United States Patent Application Publication US 2008/0039413 A1 - sequence listing, part 16

SEQ ID NO: 2077 - DNA, 90374 bp, Homo sapiens
  misc_feature (1)...(90374): n = A, C, G or T/U
aaaggctcccagaactttggctagcaactcagaggcccttctcttctcaccttatgagttcagagttctgttccagaaactgaagttgccagaaaggtgaccatgttcctatatcttcttagggagctggaactatgacaacttcagacactgaagggtgcatttggtcattcaggcaattaaaacacccacagcatcattaagtattaggtgtaaggataaatttagtttgtgatagtttaattgctaaatgaaggagttaaactggactggccttaattctccagtctggtgctacacttaattttaatgtagtttgaaggacatgtggagtcatcatacaaattatgatgaaatttgaaagaagattcctgagcaacttacctatctccagtgactcatgctgattcactaggactcagagttcaagctgctaactacgttttgcatctcttttccagtagcaggagttttaatgtgaatggacacaaaactggccaaaattttttgaaaaatatatccacagactggcattttctttctttctttttttgagagagggcctctctatggtcctccaggctaggcgggagtgcagtagcacagtcatcacttactgtagcctcaacctcctgagctcaaatgatcctcctacctcagcctcccaggtagctaggactacatgctcatggtgccatgcctggcaccatgtatttttagtagagacagagttttactatgttgcccaggctgatctcgaactcttgggatcaagcaattgcttaccttggcctcccaaagtgttggggttacaggtgtgggccagcatgcccagacatggcaagtattttcaagtattttttgaggatgaagttagttctgtgttgtttttatttatttttatttttatttatttttatttatttattttcttgttttgagacagagtcttgctctgtcgcccagactggagtgcagtagcatgatctgggctcactgcaaacttcacctcctgggttcaagcaattatctgcctcagcctcctgagtagctgggattagaggtgcctgccaccacacctggctaattttttgtatttttagtagagatggggtttcaccatcttagccaggctggtcttgaactcctgacctcatgatctaccaacctcagcctgagccactgcgcctggccagttctatattgtttttaaatcacaaaacatctgtgagatagctgaagtactttcatggtaagaactatttatttgtaaaacttttttttcttgaatcataaaataatacatgcatattaaagaaaacttagaaaacccagaaaaacagaagattttaaaaatcacctataagtccaccactagggtaattactgttatcgtttttaggtatattcttgcaaaactgaatatttagtattaaacacacacatacacagacacacacacacacacacacattgattatctctggtaagaataacagtgtgtttgagaacatgggtagaagaaatactgcttttcaatgttgttattttgtactttttttttttttttttgagatggagtctcgccctgtcacccaggctggagtgcaatggcgccatctcggctcaatgcaacctctgccttccaggttcaagcgattctcctgcctcagcctcccaagtagctgggattacaggcgcctgccaccacgcctggctaattttttgtatctttaatagagatgagatttcaccatgttggccaggctggtctcgaactcctgacctcgtgatccgcccaccttggcctcccaatctgctgggattacaggcgtgagccaccacgcccagcccattattttgtacttttaaaaaataattggtaactcctttgtatgtgagaacacaagaatttagaagtcaagcagggaagcatcgacttcattcttttctactgtgtgattctgagatgctattgttctccttaaaacctaaattttccatctgtaaagtgagatgaaaaatctctaattccctgagagtgggggaaaaggaatatttaattcttttgaactttgtactgtgtatatatattgcctattaacaaaataataaaaggacataagtctacgtgtccaaatatcctttttgcttttctttgttttctatggtttataataatcagcttgtattgggaatcactgatgtaaaagtcaacccacttcactgactaccataggcatctcttggaataaactggctagagtttattcttgctaataactttgactatattcacccacaagtatttactaagagtagcccctgtgtggcctcagtactgaagtagtgaattatttaactagtctatagtgaattatttaactagtctaagcaaaaataaagtcaaacagtgctaaaacatggtcatagatccaaagttaagtacctattcattctctcactctgaactgggaagtcccagttcttccctctaattgcagggcatcactgaggatgcagaattccgagtggtgcactacacttattcaaactgatgggaaaacaatgccatcagcatgaatcaataggaatggtgctcttggccaggagactgttatttctggggacggcacgcacactcatttctgaggctgagaaatgacactattagtgttagacttagcagtacaacaatgctttccaaacttttttactaggaaataactttagcaccagtaagtatgtatgtatatgtgtgtatgtatatatatttatatgtatatctcctgtttatattttacaagtctgattttataaacttccagatgttccaccagagttttctcttttttgattttaccttattactgtcctttactgctgttcctcttactctataaacagaaatttcctaagcttcttccactccccattttcctactctcaaggctctgagaatttgagctaagagacaaccttaagtattgggcataggtcactgaactaccattcagaacccagggattcagatcatgactggctgtgtgattctgagatgctattgctctcttaaaacctaaattcttccatctgtaaaatgagatgaaaaatctctaattccctgagagtgggggaaaaagaatagttaataatttatcatgaagtgttagctctttgggataaaagtttcaaatgaaatacgaggatttaaatccaaaggtatgacactgatttttcaaatttagcattgtcagcacttaaccatgtttcctaaaagcatgaattcactcaatcccaaatgccatggtatgagacagttatctgtcatcaccaccttccccattttatagaagcacagagaagtcactggtccctggctattcagctaattagtgacagagtcaggagtcaaaactaggtagctgggtgccagagtctagttactaggcagccagtaactacgaaatcacagccagttaacttccaactgtgtcccttccttgctcaaaagccttcagtggctcttgaagcctaataataagtacagactccttagcttagcaataaagacactccagctacctttctttcctgtttcattccccatgaaaatccttcctatgtcctcccgtgctccagctcaactgtaccagccacacttccctgaatagatcccatgtggtcctgctctgtgctttgcctctgatcatctctgtatctggaatccacctattctcacctcctcttcacttttctacattttaacctttctttcaaggtccttgcaaggggccatgtccttcatgcattttcccctgcccttctcaaccacagctggttgataatcttcccggggaattttatctctgctctcctctgcatgtatcagtttctgtacatactatgttccctccttagtaagagatgagctcctcgaaggctgcaatattattttcttcctcatggaacttttaaattttattaaaaatttaagccattcctgttctttttttaaaaaaaaaaaccaaatgcatgcatgcttgttgcaaaaaaagaaccctcacagaatacatctcttagaaagtgaaatccaccattatcacccctctacccctgccctaagagaactgtggttaacagtttggaatgtattcttatagagctttttcatgcaaaaaattatttacagaaatggaattatactacatgtaaagctctgtacttttttcacttaaaatgtatagtatttttcatatagatatctacctcattctttttttttttttttttttttttgagacagcgtctggttctgttgcccaggctggagtgtagtgatggaatcatagttcactgcaaccttgaactcctgggctcaagtgatcctcttgcctcagcctcctgagtagctggggctacaggtgtgcaccaccatgtccagctaatttttaaaaatcgttcccagagacagatctcgccatgttgaccatgttagtctggaactcctgggctcaagtgattctcctgctttgacctttcaaactgctggaattataggcatgagccaccccacccagccctcattcttttctaagtgcagcatagcataagattgtagtgatgcacctgttcaatcccttcttgatgcgcatgaaagtgatttccaatttttaccattatgaccaatgctgcagtgaatataaatacatatgtgtgtgcatgtattgctatctatatatccatataactttctttggataggcaattgctaggtgaaatggaatggagattctaaatgatgataaatataggaagtgtcagcggtgggaaggaagagtcttgttttatgcttttctgcatccttcacaaggcctaacattgcatctaccagtgtagcttggtaggtaaaagaccaggctctggcctctggctgtccaggtttgtatcagggctttatctgtatgccttagccatctcatcaccataaaataatggcagggtcattgtcattataaagcttaaatgagataatacatgcataacaattagcaattagtaagtacctggaaaacaagtaaatgcaagacatacagaaggaaaaatggtaatgggttcagataattgtttgttgaatgaattggactgaataaaacaatggcagtttgagcaatcattctagaaatggatggtacagaactatccatactttgctatcaaaacccatagcaactatttataaaatgactggctaacattagaggtgcagtgtatagccctggagcaatccatctctgtgcaaaatgaactggcctgagccagaatcaaaccaatgaccttggcctctttggccccacactttccctaatagaactaactggccccagctgcagccttatgtaatgggtatctatgaggacagaacaatagttccctgcagggtacactggctcaccactggaggttgttaggttatctagctaaccagccattaacattgaaaatgaatagaaagtacataaataaatgcttagagtagtgcataaggttttctgttgagattcttaggttctaggccagaagttttcatcttggtggcaaggtttctataccaatactagaagattctaaggtagtcaactctgggttctagaaccaactctgccactaactattatagcttcaaaaccttgagcaaattgttgagctttattttaccttggtacaacaagggggctgaaatagctcacatgaaacgtccttttttgacattcctttccccacaggtacagtcacattctcagacatcagggctgtttattgcactgaacaaaattaaagtataaaattaggcaacagcaatactgtactttcaaaatgtgtcaatgaagtgatggcaaaagtaaacataagaagctagacacagccaggtgcggtggctcacgcctgtaatcccagcactttgggaggcggaggcggatggatcacttgaggtcaggagttcgataccagcctggccaacgtggtgagactctgtctctactaaaaatacaaaaattagccgggtgtggtggcgcaggcctgtaatcctagctactcgggaggctgaggcaggagaatcgcttgaacctgggaggcggaggttgcagtgagccaagatcatgctgctgcactctagcttgggcaatagagtgagactctgtctcaaaaaaaaaaaaaaaaaaaaagcagcaacagcagctagacacagaaggccacatatatatgattccacttatatgaagtatcaaaaataggcaaatctgtagactggatggaaagcaagttagtggtgaccaggggctgggagaagagaagaatgggaggtgactgcttaataggtatggcgtcaactttagaagccatgaaaatcggttggaactagacagtggtgagagttgtacaacattgtgaatttaccgaatgccactacatatacactttaaaatggtaaaatttatgtcatgtatactttatcacaataaaaaagtgtccccccaaaaagagagaaagggatggcaaaacatagcagggcacagactcacttgacgcctgcttcaaggtgacatgagaggagggtgggggtgggggtccctctgaggaagccctgggagatccaggaataagagagtggacattagtgcaggatttgtcatctaactggggccaggtcctggccagggacaagtgtagcagtaaatggggctccagtgaagtatgagcatctccccgagtgcactgatgatgaccttccctcagcccaacatgttcctggcctcctcccactggtgtcaaactgtatccatctaagtcccatttcaaagcccactcccttcttgagctcccccaccgtccccccccaccccccatcccccattcagagacacatttccctcttttttatttattttttttctgagacaggttctcactctgtcactcaggttggaatgcagtggcatgataatggctcactgcagcctcaaaatcctgggttcaagtgaccctcccatttcaacctttagagtagctgggaccacaggtgcatacctggctaatttaatattttttattttttgtagagatgaagtttccctagttgtccaggctggtcttgaactcctggactcaagggatcctcctgccttggttttccaaagtgctgggattacaggtcgtgagccactgcccctggctatatcttgtccttctaaaagttgacagcacttactctctgtgccattcccagggcacaagcctgcttcagccttctagagacacctgtattctcttgccacccaaggccttctgcttctctttgcctcccagcatccaatacagtagtgctcaggaaatacttgtggctctgtgatggagtgactcaggcagccccacggggagtagagttttatgagtttaatatgaaccataccctgaaatctgagaaatttacctcattgctcatgctggaaaccctcagttccagtcggatttgcttggagctggatggaattgtgttgcttttcatactgaaaatgatcatctaatttttaaatttaaaaaacatttacgtagcacctacttcacgttcgacaggaatctcaacacttcacaaatgttaactcactgacttttcctaacagaggcattgagaagttaagtaacttgcccaggggtcaaagccagtaaacggcagagctgggcttcaaatccaggttccttgcttccagaggagatgctcttcagtttgttctggtgcctgaaacttacagatgagtggcaaaaccctccatgaacggggaaaaaaaagacattgatgtatttatttcaagggaaatgtgtgtgtgtgtgtgtgtgtgtgtgtgtgtgtgttttgcccatcgtcccccttttcttcctcattgaaagcaaaatgctctaaagcaaacagtcttttttcacacctgagacaccggcggtgttcatttttgctttggcaatcaaaatggaagaggaaacttgtgtggtttcatcactggtgctttcggggtgtgtggggcgggctgtccttctccctcggtcctggctcatcggcccgagcccccctccccaggccttgtggcctccggtcggtcgtggagacataagaggccgcctttcctctgttaacaccgggaatgtgccccagcctctccctccttcctgcaaatccagtcctcgtcctggagaacctcagcgtcttcttatgcctgcctctttcaaagcctcgtaggatttacacctgattaacaacgtttgcattaggatcgccagacaccggcgcacggccccgcaggcccgcgcgaatcttctacattttcatgtttcggatgttgtccacctgacttgatgcatattcaaatgtctctctcccgacgtgggaggccggagtcagaacctgacagacctgccgtttactaactgggtacccagggcaaattacttcacaagtctgagtctcggtttcctcaccgtgaaccggactggtacccataggttgcggcgtggatcaaatgagatagcgcaggggcgggacccgcgcacagcagctctcttagttcctcttggcgaggtttacgtagtaacacatgcttgtctgtttcccattttttcccagagcaccctcatgctctgggggcaggaagggagtcttcgcatcacaccgaaaaagtcccaacgggcacggtgtaggcgcctgtggtcccagctactcgggaggctggggcagaaggatcgctggacccaggaggtcgaggctgcagtgagctatgactgcgccaccgcactccagcctgggcgacagagccagaccctgtcttgattaaaaaataaaataaaataaagaaattaaagtccttataaccctggttagagcgttcccgcccactggtctcttagggcacatttaggacaacctgaagaagccactcttcttgggaccctaacccttaccccaactcctcggtccccaaaggctaagggctcgggatccgaaggaggcccagctgaggtcgctgggtggggctctgggaggaggaaatggggttcttgagggagctcgcgctccagctcgcctcctcctgcgaggacgccccctgcccggacacctgctgcccgagcgagcgtcggggccgggcctccccgcggggcagtctcggcgcgcaggtcccacctgccaggcgcggaacgcgggcggcctcgggcgcagcctccgggcgccccgcccccgcctcccccgcgcggccccggcgcccggccgcaccccctcccagcccgcggcgccccggcacccctctccctccccggcgggctccgcggagcattgtactcacatccggggctgggttttgctttaatgcgaaacgtaattaacccggaaaaaagagccgagggacgggagagaaggagggggcactgggggagaccagagcgaggggagcgagaggcgcggagagtttggcaggcagacccagaaatccctggagcgcggcggacccggcggccggaggggcgaccccgcccgatgtaacgcgccccgcccgagccccggcccctgcacgggggggtaagttgggcgccctcgcgggctcgggagtggagaggcgcagaggggcgcgcgggggctggcggggctgggggtgcagggggcgccccggcggaggcctggcggcctaggggcgcgaggggcgcgcgcgcagggctgaatacgccggtcctagtggctgacaggcgaggggaggtggccgcagaccctggaggcctcctccaaccctctgggagagccccgagggcagcccctcctccaagtgccccgggtggccaaggtcgccgccgccaggggtcgggctgcggggggtggggccgcggagagggtgggggcgggagttctgctgagctgcattttctcacgtttgcagcagcgaaacttctctgcgggttctggcgctggggcaccgaccccgcaacgactgcccgggctgcgggaggggaggagagcagagaacgtccccaggcaagtcccttgggtacggattgggccatggagactcctctttcactcccccgactaccttattaaatgacaggcctagaaggctcccctagggactcctgtcctttcctctgggtgcagcctggacttcgggcttctggaactccagacagtgaaaaggactgccctaaaatgcaggttcggtgccaggttgggtgagccctcgaggggagctgtcgttctctctctcaccaacttcttcctcaccttacacgcttcccttttctcctccagtcctaaagacgatttcaccaaaatttttttaaaaagaaagagaaaagaagggtggggggggggtggtgggaagctaggccgtttagaagggaaaagtgtccctgcacgcccagagaggggcgcagggcccgctgcggccggagcaccctcacatctcctccccggggccagccctgcccccaggccctagccttagggtttggcttccttccttcttggtgaacgcaggttcaggatgtatcttccccttctcattccttcttcctgcccgccccctttctttctttagggctccaagtggggttttcagaggacagtaaacggcagagaagagggaggggagagcaccccaccagaaagccagctgtggctctgggggctctgaaggctgagctgtagatgcacttggggctgaagtcccaagattgcactaatggtgttcttaatatatctgaccaagtcccattttcccttcttttgtcattttttttctttggttgcgaagccttccgaaacagcaaagcaaaagatcttgaaagaatagaagtttttgctttctatttcagttgcattcagttgacatgtattatacatgcaaggcagtgatgaacaaaacacaacccctgtctttattttttctttttcctttacctctggagggctggaccctgtctttggcgagcttacaggacttgtaagccccccacttgttttgagaagccagagtaagcttttagaaagcatcatcatcatctcagacattagccctcttcaccatgtgccgcctgaaggcagatgacttttgcactatcagaggtctagcttgtagtctagattatggccagcccaacgtatgacatgtaccaggtgctaagtaaatgtttattgcattaatgaatgaatgcaaacacatgaattgtttgcacttgtccaaatggcagagaaaagagcagtgtggttgttcctcaaacctgtagggatttggttctccaagctggtacatgggagttattagtccggatgttgcctttacacctaagtatcctttgaccctgtttgtacattacagcatgctttctacaaattgtctatggcactcctagtggggttttagctagctggtaatgggagccttgctcatttcacagattggtaattaccttggtattgattgagaaactgcctgccctttggtgaagagtttttgcaaccctttctttttccttgtcattggtgctttcttctctcttctgtgttaaggaaatagggcctgcagatcccatcatgtcatggtagtgagctgaaccatattcagctcggtatttttgagtggttaaaataaatcttgaagacatgcaggttttggttggtgcaggtttttgttctgcagaagtgggaaggggaaggctgatgagccctatcagctgagccccagagcagccctcccactaccttgccaagtgtttgccgaagtgctaggatactaggaagacccaaggagcgttggtctcctgtccaattcatgggacagatggacaggtgggtgatgcccctgctgaaaggctggatgactcagatgagagcttgctgcagaccacagtgcatcagaatatctcttctgattcacggaaactgctgtggctcgacttattccggttgtgatagacctagggcttggaaaagaggatctgggtgctgggacgttgggttgctctgccccctctctttttccaccatgaacagtttgggttgccttactttccgttttccatctgtctcagtgagctggatgggactccagcaatctaatctggtaggctttggaaaggaaggaaggaaagcaaatattatagtgtgttggcctatgggaagagaagaaccctggccctgcctgatatgagcccattattgagatggggtattggacaggcgggggagatagggcagctgagaggtgggagggatgcggccccatcctgtcagtagaggaggccgggggttggtgtagtgagaccctactgttccttctgaaagccccttccctgccctgaccccagttgactgaagtgatttgttatgcattaaagccggaattgggctttctcactgtggaggtcccatccctgctggggcaggggctcctgatattgcccagtgtgggcaaaaggcttgggggctttggccctgtggtgtgccttttgcccacagtgcctggtcagctgagatgaagaggatgggaagctgggtcctcttgtccttatgctcttgagaagcactgcagttaaagtgcgaaggctgggactcaaatttggctggccccttgcaaagcagctctctgctggtatgattgcccatggctggatcaagaggcagcttgccttggaaactgacgagcatgtctaggtttctgttaactctcagggtagcctggccaagaaggagtcagcacattgcctggactttttgttttaaacctcctggagaatttttagagatgtaaaatgtggtgtttcttggagtagagggaagagtgagggaagctgatgcctttcctcgtgagaggaatcccagagtcgcagctttttcattgacatttgctcactggagttagagggatggaggtgcgcatgcagcagctgcctgcccagtgttaagcaactttgcagtagtaatgatgaccatgtactccttgttaggcacccacacatgcagtttaacaacaacaatatttacccaatgtctgggtgtccagcacttttcacacattatttcatttaatcctcacagcagcctttgaagtaggtaaagcaattatctccattttgcagattaggaaatagaccctgaagacttaagcaacttttctgcgtttgaatccaggtctgtctggctcaagactcatgctctttcccttcactccactgcatggatgggatgggtaactgaaatcagcacacccttttgaatggtcatcttcttgcaaaagttccctcaaaaatactcatattggctggatgccgtggctcatctctgtaatcccagggctttgggaggctgaggtgggggggatcacttgaggctaagagtttaagaccagcctggggaacatagcgagaccccatctctacaaaaaattgaaaaattagctagctgtagtagtgtgcgcctgtagtcccagctactcgggaggctatagcaggaggattttttgaactcaggagtttgaggttatagtgagctgtgatcgcaccactgcactccagcctgggcaccagagcgagaccctgcctctaaaaaaaaaaaattttttttaaatactcatactgattattgtcacctgcacatcctccttaccacacccagcccctcctccttccctaaatcaagagacagaagcacatgtctttagaggaacagagctaggccatttacgctcccccctcaccactcccctgccccacccccagcacttagcaaaaggccagtaggttggagaaattatgttttttgtgtttttgctttttttttttttttttgagacagagtctcgccctgtcgcccatgctggagtgcagtggcgctatctcggctcactgcaacctccacctcacaggttcaagcaattttcctgcttcagcctcccaagtagctgggtctacaggcgcatgccaccacgcccagctaattttttgtatttttagcagagacagggtttcactgtgttagccaggatggtctccatctcctgacctcgtgatccacccaccttggactcccaaagtgctgggatttcaggcgtgagccactgtgcccggccaggagaaatggtgttttcttttcattctcttaactgcccatgtattagtaccctttggttgacatcgtccattataaaatgaagattagagttccaggactcgcagctgttgttaggaagcccaatagtgaaaccgaattcattgtggggaaactttcacaattctgaaagttggagatctcagcttttataggctgtaaagccagtatggctgtgtgcctgcactggtgccctctctggtggagatggtctgatgagccttcagccccgggcaggcttttgtttcctgcaggctccaacaaccacattttctttgaatgtagatgaggctgctgtgaagagaggtcatgagtgtctgaaatattttgttgtttttggcatctttattgcagtggtatcaatttccagttactcctgccttacacccctccccccatattttttcaaaaattccttcttgagtatctcttgctctctactccaagttctagggtccagtggggattgggctatctcagggtcaagccagcaccctgtctgatccgccccccgccattcctgtacatgtttgcattcctcaccctgcacttcctctgggaacttgttctcagtacgttcccttctctcgcactttattctcccgccttacactatttggaatctgctatcatgacagtttcaaaatgcggccatgttagagcagtaggaagtggaggcttccacacttcctaagttataatctttgacccattctcagggatgtgttctcaaatagccatgcttgcattttgctgttgtttttactgggtttgtacattgcgaaggctctggttggcttcacaatatatcttgatgtatgctgcaaatctgaacatatatgaactctgttgacatggtccgtatgtattctagcaacaggtgagtgactgctccatatctctatacctcagttcctgtctgctgtatttcatacagtcctctttgagatctctgatgttatttcccaaaaaactttctcctgttacccagttgagccatttctggttggtagaacctcagtcactactgaagctgctgcctgcagcttctgccctggtaggggtaacaggacagaagatgtacgtaccacacgccccactccttgtcaaaaagcaccttttgaatattttctggagcaaaatcccagaaattccttgtcctgctaacacagaatgtgaaagaaacatctctaaattttaaaaatgagtaatttttttctcatttttgaactgaggttgtagtaattttgtacttcagccaataccactgaaggctttatctctgttatcactttctcttattatttatctcaaaaatgctaaagtagtcaggcagagtctcccatatttccctctattctttcctctgtctccaaattatgttagccatcttcaaaatcaagagggctattcagaaaaccacagctctcattacttaatacctttatagcttttctttaaaataaatctatctggctgggcacagtggctcatgcctataatcccagcactttgggaggctgaggccagaggatcacttgagcctaggagtttgagaccagcctgggcaacctacaaaaaatacaaaaattagctgggtatggtggtgcacgcctgtagtcccagccactcaggaggctgaggtgggaggatcgcatgagcccaggaggtggaggctgcattgagccatcattgtgccactgtactccagactgggagacagagtgagaccatatctcaaaaaaaaaaaaaaaattaatctattcatcttttcactcatccagccagccacttattttatgtatgtatgtatgtatgtatgtatgtatgtatgtatgtatgtatttttgagacagggtttcactcctgtcacccaggctggagtgcaatggtgtgagacattggctcaactgcaacctccacctcctgggctcaagagattctcctgccctagcctccccaatagttgtgactataggtgcacaccacctcacctgacacttattttaaaatgtcagtcctatctcccaagtttcaagaaggaaaactccactgggcgttcctgtcagggtccccatttccttttcccagagcacttttcaaggtacagctcatgtgttgtaggaatagaggaatagcagcatcgacttgggactgagtattctgttggcccgaggacctgggtgcttcttaagaccagagagcaagggaccacaccagcaggagaaagagggaaaggcgctcagaggatgttgccatacgaagtaagaaacccaaacagcttggagggtgctaaagccctctgggcaggtagatatctggctcttggatgattgtgagatgtgaaacatttatttattaggtttaggtctttaaaacaccaaaaagttccaagagagctataatttagggaaggccttgtttgtttgtggactctggagaattgagaaatttattatcagattcaaaacttatacacttgggtgggaatctgtgtggaattaaatagctttctctcctgctaaataaagtaacacatgctccctgtagaagatttggaaaaatatgtacaagtaaatgaaattccactcatagcccgtagataataacttactgttttggtgactatatatctggttttaaaacagaccgtatataggaatataagaataatatttggatgattgagatcatattatgtaccatttcatatcttttaaaaaacttatgatgtggtgagttttcccctcattcattaaaaataacctgaaaacagagtttttgaattattgtgtaatatttccttgtgagtatgtcctgttgtttatttaattattttctgggccaggcgcggtggctcacgcctgtaatcccagcactttgggagtccaaggtgggtggatcatgatgtcaggagatcgagaccatcctggccaacatggtgaaaccccatctctactaaaaatacaaaaatcagctgggcgtggtggtgcacgcctgtagtcccagctactcaggaggctgaggcaggagaatagcttgaacctgggaggcggaggttgcagtgagccgagatggcgccactgcactccaacctgggcgacagagcgagactctgtctcaaaaaaaaaaaaaagaattattttctaaccattgtgttgttcaggacattaccagttgtttgttactataaattctattgcagttgccatctttttactttaatctttctttgcatctttgttgattgacttggatggaatcctagaagtagaatcactgggtcaaagggtatgaacattttttgctttcttgttatatatatacaactaaattgctttccagaaaggttcatagtcctgtcctgggtgtataagaatcctaggaacatttttcaagtagacaacatctgttttaagcagtgatctttccctttcagcccctctagtgcctctgtgtcccatctgggctatgtgctattttctcagggtctgggtcccagctgtctcttgtatattatgagccttgcaaagttatccattgcctcagttcctcggggcaatttttttcttggcttgaatctccactggtggaacctaaggcatgggaatgggcagtagagagatatttggggctgcaatacctcccagtgccccccatttcattctctggcaggcagccattgacttccttctcatgagctgcttctagtcaactggcaggtgtcggccaggaatctctcagtttaattgccatttaacacactttctgccactgattaatgggtgactccatgcaaactcactttctttccccaagtttcacttgtatcataaatacttattttcattcgcagtacatacttaagaacttatattctacttagaaatctggatcatataaaacttcccactttttgtttttcttttcattaaaatactttttttttttttttgagatggagtctcactctgtcacccaggctggagtgccatggtgtgatctcggctcactgcagcctccacttccagggctcaagtgatcctcctacctcagcctcctgagtagctgggaccacaggcatgcactaccatgcccggctaatttttgtatttttggtacagatgaggttttgccatgttgcccaggctggtctcaaactcttgggctcaagtgatcagcccgccttggcctcccgaagtgctgggattacaggcatgagccaccatgcctagcctgaaatacattttttagttactggaataatatgaggctacgtcttggtttggtttggtgtttgtttgtgagagacagagaagagagggagagagagaatgaaggagagagggagagaaggacagggagggagacagaaagagaggaattctgtatgcacatacttttgatttgcttttaatgaagttcaggaaagtagatgaaataggaaacaaacatttaaaaaacattcaacctcactagatgtcattatgtatttgaaaccaccaatagtttaaaataatgagaacattcaatatatgtaagattatagtgatgataacaatatattgctggttgcaacatagataacatctttttagaaaacaattttgtaaaaggactcaagaattatgaaagatcatagcctgtgatctcatattattacttggaatttatgctctttccatgtaaaagaagaaataaagcatgaaaatacaaattttagccttatgtataacagtgaaaaattggatataaccttcaatttaattgtagagaaatggttatgtaaattatagtaaaaccagtccattaatgttatgcaaccattagaaacgattataaagactatgtagcaacatggaaaatgcttatgacatcatcttaagttttaaaaaggccaattatgtggatagggacatgaaaaagcatgcaaatgtgaaaattgttggctggagtgattgttaaaataattccagcattgttatattatgatttttgcactaaacccagaaaacacgagggaggtttggctagggaagatagggtgctgagtgggttggatagaggccccttctcttacaaataccctgtgtgctttgttagctgtgtgttgtgaaggccaggaagctacttgccagatagtttcattacggtatgagagcaaaggtgaagggaccatctagagacaggggtatctagagctctaacccagcatgaacactttcttttttttttgagagggagtctcactctgtcacccaggctggggtgcagtggcatgatctcggctcactgcaacctccgcctcccaggttcaagcaattctcctgtcttagtctcccgaatagctgggattataggtgcgcaccaccatgcctggctaatttttgtatttttaatggagacagggtttcaccatgttggccatgctggttttgaactcctgaactcaagtgatccacctgcttcggcctcccaaagtgctgggtttacaggtgtgagccaccgtgccaggccccagcatgaacgctttccatgttgtcccaggagatgagggctgggtattgtcaggatgcccacaggcttacctgggaactcttgagataaaccaccctcggtcaccctctacccaatattttcacactggggaactcaggacaaaatgaaatttaaggctgggtgtggtggctcatgcctataatcccagtactttgggaggcttgaggcaggaggattgcctgggtctaagagtttgaaaacagcctgggctatgtagggagaccccatctctacgaagaattaaaaaattagccctccatggtggtgtgcacctgtagtcccagctactggggaggctaaggcaggaggatggcttgagcccaggagttggaggctgcagtaagctacgattacaccactgcactccagcctgggcaacagagtgtgaccaggtctctaaaaaataaaaacataaaatgaaatttaaggtaagtgattttggctgggcgtagtggctcacgcctataatcccagcacttggggaggctgaggctggtggttcacctgaggtcaggagtttgagaccagcctggccaacatggtgaaaccccatctctactaaaaatacaaaaattagccggatgtggtggcacacgctgtaatcccagctactctggaggctgaggcaggagaatgaatcacttgaacccagtaggtggaggttgaagtgtgccgagatggctccactgcactccagcctgggcgacaaaagcaaaactctgtctcaaaaaacaaaacaaacaaacaaaaaaccaaccatgtaactggcagagtgttgtgagagttagaaaagacattttgaagctttgccttggtcttggcaggggatttgggggtgatagcatatatatgtacaccaagttgttcccccatctaagtaccaattactactggcactcccctttctcccctcactggctcattgctagaatagtagaagctagggatgagctggcaaagttaacttccacacaggcctctgtgaagaagaggaagagccagagaagatttggaagattatggtgacatggcagaggaggcgaggacagtggatctgggggcctggggcagctctgtggacccaatcttagcaactgttgagacaaaggatgtacaaatgggatcagaatgaaccatcagaggattagggctcaggacctgaggttcatgttgtgtgcagcatctgaacgtgccgctgctgcgtgggtcagctagttagagccacatttctgtgtgatgctctgttctcctgcagccagtccttccccccacctcccacattcctgatgagctctgtgactcagctgcttctcgggacgtctgagcagctgtttttttctagggatagaagcacagtcaggagatgtaacctgaatgcttatctttcccttgggtccgtgagggccctctcccaccgtgaggcccctgaaacaaaactggacttttagaggattgtagaaagagtgccttctttagcccctgacttcagaaaaagacaggcatgaccaggcatggtggctcatgcctgtaatcccagcactttgggaggccgaggctggtggatcacctgaggtcaggatttcaagaccagcctggccaacatggcgaaagcccgtctctactaaaaatacaaaaattagctgggtgtggtgatgtgcacctataatcccagctatttgggaggctgaggcaggacaatcgcttgaacctgggaggcggaggttgcagtgagccaagattgccctgctgcactccagcctgggtgacatagcgagactccatctcaaaaaggaaaaaaaaaaaaaaaaagaaaaaggaaagatgaatcctgcaggctaaaaaggggaaatttgaaagccaatgttcagctggacaccttgcttagcgattgggcccaggacagttacctttgctcttccacaggagcttgtgtgttttctctgggaggtgcctcaagagtagcgatagtccttgcagcccctgcaaatctgtctgtgactggttgggcatcaagggagtttgcctggttttcttgaggggctggcgatcaccagcatcctgaccaggcagctctgcacccttcccggaatgctgacccagcccttctggtgggactcttgttcctccgtcatccagggagctgaggcttctttccaggatatgctcccccgcccccagccagcgccagaccactccccttgctgcctttgacccaatgtctgctgggagacttcacgttccttctgtggcgtctgttcctcattactggcttgtgcccatctctctcctgtttctgaactcaaacttgctccattgtgaaactggagctggggcggaagctttgttggaggaggccctgggtctgtccgcaggtgccataatggaagggttgctgctttgggcaggggtgtgcctcccctggcccctgctgtgctgcaacacatccttttctgctgtgtttctgaaacctcctctgtccatggttgatccttctcaccacctcttttactgcagctcctctgacttcttccttagctgtgctgtttcacctctgtcctgtttctcgcctgctttgctctttgtcccctatccttttgcactgagtagctgtgggattccccgacgcatctccctgatgtttgtgtctccagtccccctgacctcacctggatcaagggattcaccagtcactggtatccatatgtgtgttttgggggcatttgttcctaggggctgcctctcagcactggcccttgtggggatgggagagaacatgccacaccaccagtcgccacccttactattagcctgatctgaatctgcctgatgtcagcctgtgctgtgggagggtgtctccctctgggcctgcagtaccggggctgttgggtctctctagctcacctgctgacccagcgtcccgttgtgggggatggcctgagccagccatctcacaactttgtgtggctgtggacagagggccttcatgggcttgggccaccaggaactccactctgttggagcctgtcagggctcagcagtgggtggggtctgaccttgaaagtctgactgtcacgtggtgctttgggatcccttgtgggacccttgtcccacgtcagcactgggtgtgcatttgaattgggtgtctctgctcattgaaaggggccaatcttcgttggggagcaggatagagctctcgcccttccctttggctctcagagaggcctaagaaaattgcaacaagagcagaggttggctggtttgaaggtgtggctcatcccacattaccagagagacagttccggagtcggggatagtgctcacgggctgggactttcttctttcttccttcttctcctttttcttctttcttcctttattcctcttcttctgacagggtctcactctgtcgtccaggctagagtggagtggtgctctcatggttccctgcagccccaaattcttgagctcaagcgattctcctacctcagcctcctgagtagctgggactacaggcacgccaccgtgcctggctaatttttaaattgttttgtggagacgaggtctcactgtgttgcgcacgttggtctcaaacccctggcctcaagcgatcctcccacctcagtcccccaaagtgctgggattacagttgtgagccactgcacccagcctgggactttgttctgattcctcattctttccattataaagggtaaccgtattaggctgctcaggccatcataaacaaggaccacagtttggatcgcttaaacggcagaagttcattttctcaccgatctggaggctgaaagtccaagggcagggtgttaacagggttggtttcttctgagggccgtgagagaaagatctgtccagggcctgcgcctcggcttctggatggctgtcacctccctgtgtcttcacagggtctttcctcctcttacggagacatcagtcatagtggattagggcccatgccaatgacatcatgctaactccgtcacctctttaaagaccctgtctccaaatatagccacattttgagggccttagggttagtacttcaacatatgaattttgagaggacataattcaccccgtaacaatgacagtggagtgatgtaagatgctgggccggggctgtgaccctacctcaaggctccagaaaccccttgcattttaatcttttggtatcttcatggagctggagaggctgtcctttgtgacttaattcctggcagaattttagaaaaattttttatgtttaatttttgtgcgtacgtagtaggtgtatatatttatggggtacatgaggcttgcagcacgtaacagtcacttcatggaagatggggtattcatccccttcagcatttatcctttgcgttacagactgttcagttatattattttattttattttgacagagttttactcttgttgcccaggctggagtgcaatggtgtgatctcgtctcactataacctccagctcctgagttcaagcgattctcctacctcagcctcctgagtagctgggattacaggcatgcgccaccacgactggctaattttttgtatttttagtagagacgaggtttcaccatgttggccaggctggtctcgaattcctgacctcaggtaatccacctgcctcagcctcccaaagtgctgggattactggcatgagccaccatgcctggcctcttttagttattttaaaatgtgcaattaaattattattgactatagttaccctgttgtactatcaaatagtaggtcttattcactctttctaactattttttgtacctattaaccatccccatttccccccagccccccactacccttcccagcctctggtaaccacccttctactctctatctccatgagttcaattgatttgatttttagatcccataaatgagtgaggacatgtgatgtctgtctttctgtggctctcttatttcacacttaacataatgatccccagttccatccatgttgttgcaaatgacaggatcttactctttttttatggctgaatagtactccattgtgtatatatgccacattttctttattcattcatctgttgatggccacttaagttgcttccaaatcttggctattgagaacagagctgcaacaaacataggagtgcagatatacctcttcaacagactgatttcgtttctttgggtatatacccagcagtgggattgctggatcatatggtagatctatttttagttttttgaggaatctccaaactgttctccatagtggtcatactaatttatattcccaccaataccgtacaagggttcccttttctccacttcctcaccagcatttgttgttgcctgtcttttggataaaagccattttcacgggggtgagatgatatctcattgtagttttgatttgcatttctctggtgatcaatgatgtcgagcaccttttcatgtgcctgtttgccactcgtatgtgttttccttgagaaatgtctgtttaaatcttttgtccattttaaatttggattatgagattttttttcctataaagttgtttgagctctttatatattctggttattagtcccttgtcagatgggtaatttgccgatttttctcccattctgtgggttttctcttcactttgttgattgtttcctttgctgtgcagaagctttttaacttgatgtgatcccgcctgtccatgtttgctttggttgcctgtgcttgtggggtattgttcaagagcctggcagaattttattcagatgtttgaattggagcttacatcctttctgagatcatttcttccatgtataaaattgagttgcgagccacttcacaaggttttgtgcagagcaacgataatagctactgttcaggaagtgcttactgtgtgcctaccacttaattctcagcccaagccttattattaaccccgttttacagatgcagaagctgaggcacacgaaggttaaataattggtggtcatacaattaacaagtatccagaactggaatttgaatgcaggcccctgatctaaagtctgggcttatctcctctatggatgtaaagtgcccaatgctatcctgggcacatagagccttggaaaagtgagttgaatacgtgtgaatggatttttaggggtgcttaacattgggagaggtttccagggtctgggatggaacatttggtgcccccacggaaggaagctggtgagagtctcagcccagcttctggaaaagattcctgcaggtcctgaggcagagctgcttcatcttccttctcatcagcacctccctcctgcgcgcagggtgatgtgagcagagcccaggaatgccttatgtggatcggcagaaccgaatctgtgggtttctggacatcgaggagcatgagaacagcggcaagtttctgcggaggtacttcattctggacacccaggctaactgcctcctctggtatatggacaacccccaggtgagagggtcagtgggaaggggtggggcgactgggtgcccatcactgcgccagaggaatgcacacagggttagcctccaggcctaggctcgtgagcaacacaacctgctgatcagcagggaggggacaaccctacaacacacacagacacacacacaaatgcacattcacgtgcacacacaccacacacaccccatacacaccacacacacgcacacacatgcaccttatacacacacaccacacacacaccgtacagacaaacacaaacacaacaaaagcaggcaccacatacacatgcagacacatgcgcacacgcacacaccatacacacacatgcacacacacatatacacacagactacacacatactatacacacccatccacacacacacagaaaaccatctcagatcttagcttggagagaatgatgctgtcctgaccctggcatctggtgtctgctctcacacgcagagaccagccaggatctgccagtgagatccaagtcctggatccaggctccaaggcatggcttgcttcctgttacttctctccagggctgtggcctgtggctgctcctgctcttccagtctgggggcccctccccagcagagaatgtgacctggttccctgagccggacacatgttggacttctttggtctcctgactcaggaagtcctagaatcctggattggaggtgcccttggaggtcacccagttttgtttcctcatggtccagatgagaagagagcctcagacactgcactggatcttggcaaggacatggtcagaattaggtgacttgctgagcatcttgtggaggtcaggcacaaagatgggggccacctacctttgactgctatgtctaggagtccctggagtcatcactgctctgggaacaagttgcttcaccctgatttgggatctcaaggcttttcttattctggccctgagtgctgttagccctttccttcccctacccttgagtgatttggtggaatgagcctgcaaacactgacatggcctctgaacagcaaggtcacaggtcatggctgtgttgggatgaagaagggtgtgggatctgggatttggctctagttccgaggcttgggaagaggaaattctgaatgtcccagggatggagttatgctttaagatgcaatgtggaaaatgagttatgtgaatctctaggtcactatccagggactaatcatctagtgatcttgggcatttgtcttctagatttgatgaccaagagaaaaacagcatagatgcggaaaacatactcagaaagtcagctgctgctaattgccttctctagcaaggattaaccctaagtagaactgagccccatgtttcaccctgcagccctgataaacctgttgcttactttcatttgaagtgcctagtattcagaatgaacccttcctaggcacactgtgacaccctcaactcagcctggaatgctgccatttgtcatgtaatgggcctggtttgccttcaggccctgcgatatcattttcctttcctttgctcttttcttttctctctttttttttgagacagagtcttgctctgtcacccaggctggagtgcagtggcatgatctcggctcactgcaacctctgcctcctggatttaagtgattctcctgcctcagcctcctcagtagctgggattactggcatgtaccaccatgcccggctaatttttgttatttatttattgatttagttttgagacggggtctctctctgttgcccaggctagagtgcagtggcgcgatctcggctcactgcaagctctgcctcccgggttcacgccattctcctgcctcagcctcccgagtagttgggactacaggcacccgccaccacgcccagctaattttttgtatttttttttagtagagacggggtttcactgtgttagccaggatggtctcgatctcctgacctccttatctgcccaccttggcctcccaaagtgctgggattacaggcatgagccactttgttacttttagtagagacaaggttttaccatgttggccaggctggtcttgaactcctcacctcaagtgatctgcctgctttggcctcccaaagtgctgggattacaggcatgagccgttgcacctggccgtttttttttttttcaatttgggatcttactccgttgcccaggctggagtgcagtgatgcaatcatagctcaaactcctgggctcaagtgatcctcccacctcagcctcccatgtagctgggactacaggtgtgcgccaccacactgggctaattatttttattttttgtagagatggagggtctcactttgttgaccaggctggtctcgaactcctggtttcttttttttttttcttcttttgagacagagttttgctcttgttgcccacgctggagtgcaatggcgcgatctcagctcactgcaacctctgcctcccgggttcaagcgattctcctgtctcagcctcccgagtagctgggattacaggcgtcagccaccacgcccagctaatttttgtatttttagtagagacggggtttcatcatattggtcaggctggtcttgaactcctgacgtcaggtgatccaccggcctcggcctcccaaagtgctgggattacaggcatgagccactgcgactggcctgaactcttggtttcaagcgatgcttctgctttggctggagttaaatgtttgttgccagtagacttggctttgggcacaccagagatgagccctgggtgacttatgggtcttcacgttccctctccattctcctcctttgtgtacttcctcccactcacctgctgtgttagtgcaagtcattcgaatggatttttgtcttgatttacctgcttcacgccatgcttccccactagggctgtgctttacccgaactgacttgcttggggaatcctgtctggctgttgccagctgcctccctggagagttggatctttcttcacaccctgggtcacagactgagagttgtgctgtcagtggcagatcacccaggaccacagtggcaccatcttggaacttgaatattgacggttgtcaggattcccctcactctgatttgtcactggggcccagaacctgtgctaagcctggacgctgtgcctcgggctgccttctaagctctctggggtcagcctctgcagcaggttcccctggcccagggcaggctcttactctttcctgctagctgagctctcagggtgttttgtggtagaaccttcttcaagtttgaattaccaggtaaaactaactagtggcccactgctggggattctttatgttttcccaggaagcagtagagctcacctggcttggcatattcttgaaaaaagagagtcttgctgtgatacagaaataattcaggacattttacttcttcagtggttgggttagttctttgttgtgtgaacagccaaacggccactccagatttaagtgtggatgtttcagttaagttctaaaatggtattagtgagcatttattactgtgtgccaagcacacttcattgggtttttatttcattctgacaacaagtttaattggtagttattattgccctcattctgaagatgaggtgggtgaggctgacaggggaagaatttgcccgtggttacataataaaaaagtagcacagctgggactctaaccccgacagtctaactctagtgcccctgccattattgctgataatgagacaggcgtctaagggtgacttggaggatgaagagcctgcaaaggtagtttctggttaagaaagagaaacctgaggactctcggggctgggaggtcctagaaggtagggcactcgtgtggcttagttttttatcatagtgtttccagcatttgatgaatatgtgttcattgaatgaaggaatgaatgagccagctaaagagggccagggaaggaagtggtcagaagtcaggtcactggggaatgtggagtgcccaacattgctttcctgggactggggacagggccaaaatggaatggaagctctgcagagaggggcatcctggggattttggtccattcctatgaaaagaggcattgagaactgtgtgtggtcgttgaacatctttatttgatagggacaaggagatgcctgctatgttttcttaattatttaataggcagtaataagcagaagatttttggacccaggtctccgatctttgtgtgttgaagccacctggtaggtggtgttcactgagcctgaatctgttactgctgctgctactgctgttattactaactgcagcttatacttactaagtggttgccatgtaccagctatggtgtgaaatgcttttacatgtgttaccccatggaacctctccataatcctggggcctagggtctgttgttactctttgctcatggttgtgcaggtggtaaatgcagcgctggagccaggtccatcgactcaagtgtgcaacctcctctttgtctgcctccctcctcccactgacctctgtgctcagcccgtgcaaggtcttgtagatgatgtggaaaatgaattcggtgaggcctttgccaccaggaagcttcagggttagctggggagaggaaaacaacacacacaaaactatggtgctaataatcctggcaactcattataacagggtagcatatcattaggtgccagtgccaatgcccggatgccaatatttgggttgaaggagaagcagttgccattttcctttgctgccacccataagggaaagatgtagggcttggaggtggagtctcatatggaaagttctcatgctgcagagataagagatcaaggttgcaatcttggctctgccactaagttgatttacatcttaggcaagtcacttatcctgtggagtatgggcactctaggtgatcctttcaccagcacacctggctaatttttgtagttttagtagagatggggtttcactatgttggtcagcctggtcttgaactcctgacctcaaatgatcccactgccttggcctcccaaagtgctgggattacaggcatgagctaccgcgcccagcctgtaggtgatccttaagtgccttttatcctttcatttcctgagaatagaaggagatcctggagttcaacagcattgttaacacatatttactaaatttgttcagcgtgccagatgctgatctaaatactgtggctacttcagtgaacaagacagtctttgccttcatagagtttacactgtatttggggaaacagacaattggggtggggagagctgggggccccccttcatagaggaggtgtcactagatccagatgttgaagggtgtgtgaggttcatttttgctatacattatttgtatttgcagagcattttgtgggttttccacttactttttaaaatttgtatttatttatttttttaagacagagtctcactctgttgccgaggatccagtgcagtggcgcgatctcagctcactgcaacctccgcctcccagcttaaagaaattctcgtgcctcagcctcccaagtagctgggattacaggcctgcaccaccatgcccggctactttttgtattttattagagatgggggtgtcaccacgttggctaggctggtctcgaactcctgacctcaggtgatccacccacctcggcatccaaagtgctgggttacagatgtgagccactacgcctggcccggttttcacttacaagatgtcctttgattgttatacctactctgccccaagcagagatgaagaggaggagaagggcgttctgagttggggaaacagcagtcattgtggggcagaggtgagctcgcctggttggaggggcatttagggtcgtcagggtccccagaagaagaccctgagacgaggagtcaggcgctgagacagggagtcaggcgcggaggcaagatctgtcaggaagttctttattgaggaaatgttcccgcggggactgtgaagagagctggggaaggaggacagggaagggaggaggccagacaagggtgtgaactcaggtggaggtctgagcaagggatggtttcactgtgggcctgcaggagcgctggggtgagtcatgcctcagccttgtctcagggagctgggctttcgtgtgcctgcaccgggcagtcactggctccagctctgcacatgtgggcagaatggcttccagcagcccagaggcagttctctgaagcagagctgtagatgcaggccatggaaggcacagccaaatggcaaaaagagatggagggaatttgggaagtcagtggcaacgtctgctagatggacatacggtgggggtgtgttggggatcagaacacagcgtgggccaggcgcagccttgaatgtctggcagaatttagaatcagtgtggttaagtaatgaatcaaggcttctcgtacaggcagtggtgactctaaactgatatagaacaaaaacccattagctaaaaaggacctgtataaatggaaagtctcagtattattgattatggacactgatttggctaatgcatttaaaaatcaatatactgacaatatcaagcaaacttttttttaaattatagtaaggatgttcagcatgagatctacccttttaacaaatttttaaatgcatgataccatattgttgactgtaggcacgacgtaatacagccagtctccctactctagaacttcttcatcttgcatgcaatcaaataattcttgaacagaaacaaatgctggcttgattttccttaaaatgttactacaatattatggcactagcgcttgtattttgatttcacattggttcccgtcatgatagaggagatgaaattccttagggccgccctactctagtacagcaatctgcagactaactatgttttagttgcagagaattgcttacatcccccactttctaaagtccacttggctaagtaattgcaagaccaaattatatggccctgaacaaagagtaaacagaagcgtgaaacacaatattgcactagattgctggtcttgtcaaatttactctgtcaaatgtgttttttcctctttttccaaaaaatacgtagttgcttttactttccaaaggccacgatatgactcatggatcatcaaataaccaaaaagattgcatggctcttagtactcctggggtgccaatgaaagccctttgcttttatttaatttttttaaataaactgaaagcagttctttccattgatggggtgaagagcgttagcagtgttggtaagaagatggatatttggtgcattttagtagaaagcatacaaagttatgggaggaggttataataacacataatgtataatggacaatactgttgtcttaaaggctacatgaaaattggtgtttttttaaaaaaacgtgaaattttcctaagcaaattttggctgaaagccaggaataatttttgcattgtatgcttcaacctgtcagaatgccaagaaccaggaaataatgttctttaaaaattgggcaatagatgcacgtggtgcagaatttggaatgtaggaatgcagagttagtgacaaatttctccctcccacttctgtcctctcagcaggggcagccagtcttgacagtttcttgtgtctgtctggagataatctctgcctgagagactatctcttaagatcatggtaactttcagatcttcagcaaattgtttgggcaaagtgtcttcaattcatggattttgtgtaattgatatcttaactatccatgtagacttgtgatttccaggagtcagtggaatatttgatgtgcttttgtctgtagtgtgttagagtaagaacgcagaatcctttggtaaaaaaaaaatcccaaaagaagattataagtgacaaatctgtacttttaccaaatgcaaattttgctaagggtaaaaatattattaaaaagtactttttttttttttttttagagacagggttcttactccgtctccgagactgaagtgtagtgtgcagtcagagctcactgctggatttgactgggcctggtcaaaacatgcttagaattaaaattatatgtgggctttttgagagcttaatgtagaattagaaactgcaattttgctttatgtgttttctgtagccatcatattttttaaacaagttgtatctttataacaggatgtactttgtctaaattaaaaaaaattaaaaactaagccgggtgcggtggctcacgcctgtaatcccagtactctgggaggccaaggcaggcgatcacctgcggtcaggagttcaagaccagcctggccaacatggcgaaaccctgtctctactaaaagtacaataattagcagggcatggtggcaagctactcaggaggctgaggcaggagaatcgcttgaacccgggaggcagaggttgcagtgagctgagatcacgccattgcactctagcctgggtaacaagagcgagactccatctcaaaaaaaaccaaccaaccaaacaaacaaacaaaaaactaagtagcacattgaaagaattgtgttaagagttagcactactcagtattaaagtccaagcagctaaacagatagaagctatgaaacttagcagaggttaaataactattgcaaaaccatagtgatgactattctaagttttctcaaaacttctctttggtatgttgttgttagattttgctttacattttaaccttcaacatttgttcaatgtatttattatatacatctctttctatatttatagatctagttatataccaaagaatggtatgaccagacatggtggctcatgtctgtaatcccaggcctgtgggaggatcacttgaggccaggaatttgagaccagcctgggcaacataggaagaccccatctctacaaaaaataaaataaaataaagaaattaggcaatcgtggtggcatatgtctgtagtcccaggtacttgggacgctgaggtgggagaatcacttgagctcaggagttagaggctgcagtgagctgtgatcaggacactgtactccagcctgagttacagagcaagaccctgtctcaaaaaaagtcattttattaatttattatctaaatagtgtctcgaaggcaaaggaggttggttattgcatgtttgggggaggggttcatattagattttgcttcagagaccagttttattagttatatcaattgagcacaggacaacatgatgaatatattcattaaggaaacatccattttttgagcctcctgtcctcatccacagtatatggtaatgatatcaatgatctccacctgtgacattgttgctgtgaagagtaaataatgtatgtgagaatgctttgatgagctctaaagtgctacagatgttatctgttaagaaagtttgttctggccaggacatcgggatggatggggaggtggggagagctggagctggagatgacggctggggatttgtcacagagcttcctgatatgcctgaggtggtgggaatggagagtgggggggcaggtttagaggctacatgagggaagaatgtttgaaagtttagtacctggttgactggggagaggaggtggaattactgacagaggctggggaggggagagggaaaccgattagaaagtggaggggaaatgacattgagtttgaggctggattgaagaaagggctgatggagttggcttattgagtttacagctttagaaacatttaggtggccagcagtcagagttgggacccaaatgcctccgggagattatctgaagcccaggcctctgacctggtctttttttttttttttttttttctttttgagatggagtctcactcactctgtcacccaggctggagtgcagtggtgtgatcttggctcactgcaacctctgtctcctgggttcaagcgattctcctaccgcagcctcccggatacctgggattaaaggtgtgcgccaccactcccagctaatgtttgtatttttagtagagacagggtttcaccatgttggccaggttggtcttgaactcctgacctcaagtgatccacccgccttggcctcccaaagtgttgagattacaggcatgaatcaccgcgcccggcctgacctggtctttaagtctctgtcaccagagttggaagacggaaataaagggaatgggggtgtggctgagagacttaacacacaatgaaacttatcctgtctaaagctgatactggtgtctgtcaacaagaaatcgacatccaagtaatagaataaaaacattaagcccacgcagcagaggatgatatagaatcgacttctcctgaagggaaagattaaatacacactttgaactggagaatggggagagtagctatcagcgtgtcgtgtgtccccgcgttagcatcagcaagtggacctacagggcagaggggaggagaggtgtttggccctagagcagcaggtagagccacggcccaggtcacctggtgcctgggattcgcttggctcccctgctttggttgctcatgtcagggtgagggctttggaatgtggggcagcggcagctatgctcctccttcccagtcctgtcacaccgttctcctacattcaaatgtctactctgagctataccccctctgcaggcacattcttttctgtgagtctacatggccgtggcttttggtggctgagctatggttttagctcacagacagcaatgtcagctcatgccctagctctgggattaccaggggcgtcccctccctccgtctcctgctagctgctttttactgtctgctggacaccccaggggcctgtaagagaaggtcagatggcaccagcatctctccttccttccccctttctgctctgaatctctggtctattggagtttggcacccaagagccagttggacaagttcctgccctgcccagcttgggcaatgacactgggcctcttttggtgtaaccctgctggtcctgcttttgtatttacctttcattgataatcagctcttagataatgtctcatgggagatggcagggcctaaaggaaagtgcatgggatttgggaatcaggaagggttgggcttgaatactggctccgctgcttgctgcctgtgtgaccctgggcaggttccttcacctgccccatccttagtttcttcatctgtgaaatgggattgttaggattaggcgaccacatgtgaaggtgcctagcagcatgtctggcgcatcataatttctaaatatatgttagtttccttctttctttctcaggctgttactttgccaaagcaccagattgatgttaggagtttgagctctgtcttcatttgactccctaaggaagtcacttcccccagttgagccttagaggactcatgtgtagtgaatgaagaggtatgcacaggacctttgagtgctgacatgctgtgagtttatggatcgatagttgggtcttctggtcatttctgtgttctttgtgactctcactggaagaggcggaagggagtagaagtcacatgggtaaaaatttcttcttcaacaagaaatactgctgttgctagaaaaaggattaacgtgggaggtgtgccacatccctgtatgggcacctcagctgcttccttggtgacggagaagaataagccatatattttgccccctggggagctggctccttcaaggaccttagtggcagaagagctcttgagcaaaaaggaaggtactggcattgtctgcataaaaccacctatctttatttatttatttatttatttatttatttttgagatggagtctggctctgtcacccgggctggagtgcagtggcgcaatctcggctcactgcaaccttcgcctcctgggttcaagcaattctcgtgcctcagcctcccaagtagctgggattacaggcgcatgccactatgcccggctaattttttaatacttttagtagagaaggggtttcaccatgttggccaggctggtcttgaattccgcggatcagcnnnnnnnnnnnnnnnnnnnnnnnnnnnnnnnnnnnnnnnnnnnnnnnnnnnnnnnnnnnnnnnnnnnnnnnnnnnnnnnnnnnnnnnnnnnnnnnnnnnnnnnnnnnnnnnnnnnnnnnnnnnnnnnnnnnnnnnnnnnnnnnnnnnnnnnnnnnnnnnnnnnnnnnnnnnnnnnnnnnnnnnnnnnnnnnnnnnnnnnnnnnnnnnnnnnnnnnnnnnnnnnnnnnnnnnnnnnnnnnnnnnnnnnnnnnnnnnnnnnnnnnnnnnnnnnnnnnnnnnnnnnnnnnnnnnnnnnnnnnnnnnnnnnnnnnnnnnnnnnnnnnnnnnnnnnnnnnnnnnnnnnnnnnnnnnnnnnnnnnnnnnnnnnnnnnnnnnnnnnnnnnnnnnnnnnnnnnnnnnnnnnnnnnnnnnnnnnnnnnnnnnnnnnnnnnnnnnnnnnnnnnnnnnnnnnnnnnnnnnnnnnnnnnnnnnnnnnnnnnnnnnnnnnnnnnnnnnnnnnnnnnnnnnnnnnnnnnnnnnnnnnnnnnnnnnnnnnnnnnnnnnnnnnnnnnnnnnnnnnnnnnnnnnnnnnnnnnnnnnnnnnnnnnnnnnnnnnnnnnnnnnnnnnnnnnnnnnnnnnnnnnnnnnnnnnnnnnnnnnnnnnnnnnnnnnnnnnnnnnnnnnnnnnnnnnnnnnnnnnnnnnnnnnnnnnnnnnnnnnnnnnnnnnnnnnnnnnnnnnnnnnnnnnnnnnnnnnnnnnnnnnnnnnnnnnnnnnnnnnnnnnnnnnnnnnnnnnnnnnnnnnnnnnnnnnnnnnnnnnnnnnnnnnnnnnnnnnnnnnnnnnnnnnnnnnnnnnnnnnnnnnnnnnnnnnnnnnnnnnnnnnnnnnnnnnnnnnnnnnnnnnnnnnnnnnnnnnnnnnnnnnnnnnnnnnnnnnnnnnnnnnnnnnnnnnnnnnnnnnnnnnnnnnnnnnnnnnnnnnnnnnnnnnnnnnnnnnnnnnnnnnnnnnnnnnnnnnnnnnnnnnnnnnnnnnnnnnnnnnnnnnnnnnnnnnnnnnnnnnnnnnnnnnnnnnnnnnnnnnnnnnnnnnnnnnnnnnnnnnnnnnnnnnnnnnnnnnnnnnnnnnnnnnnnnnnnnnnnnnnnnnnnnnnnnnnnnnnnnnnnnnnnnnnnnnnnnnnnnnnnnnnnnnnnnnnnnnnnnnnnnnnnnnnnnnnnnnnnnnnnnnnnnnnnnnnnnnnnnnnnnnnnnnnnnnnnnnnnnnnnnnnnnnnnnnnnnnnnnnnnnnnnnnnnnnnnnnnnnnnnnnnnnnnnnnnnnnnnnnnnnnnnnnnnnnnnnnnnnnnnnnnnnnnnnnnnnnnnnnnnnnnnnnnnnnnnnnnnnnnnnnnnnnnnnnnnnnnnnnnnnnnnnnnnnnnnnnnnnnnnnnnnnnnnnnnnnnnnnnnnnnnnnnnnnnnnnnnnnnnnnnnnnnnnnnnnnnnnnnnnnnnnnnnnnnnnnnnnnnnnnnnnnnnnnnnnnnnnnnnnnnnnnnnnnnnnnnnnnnnnnnnnnnnnnnnnnnnnnnnnnnnnnnnnnnnnnnnnnnnnnnnnnnnnnnnnnnnnnnnnnnnnnnnnnnnnnnnnnnnnnnnnnnnnnnnnnnnnnnnnnnnnnnnnnnnnnnnnnnnnnnnnnnnnnnnnnnnnnnnnnnnnnnnnnnnnnnnnnnnnnnnnnnnnnnnnnnnnnnnnnnnnnnnnnnnnnnnnnnnnnnnnnnnnnnnnnnnnnnnnnnnnnnnnnnnnnnnnnnnnnnnnnnnnnnnnnnnnnnnnnnnnnnnnnnnnnnnnnnnnnnnnnnnnnnnnnnnnnnnnnnnnnnnnnnnnnnnnnnnnnnnnnnnnnnnnnnnnnnnnnnnnnnnnnnnnnnnnnnnnnnnnnnnnnnnnnnnnnnnnnnnnnnnnnnnnnnnnnnnnnnnnnnnnnnnnnnnnnnnnnnnnnnnnnnnnnnnnnnnnnnnnnnnnnnnnnnnnnnnnnnnnnnnnnnnnnnnnnnnnnnnnnnnnnnnnnnnnnnnnnnnnnnnnnnnnnnnnnnnnnnnnnnnnnnnnnnnnnnnnnnnnnnnnnnnnnnnnnnnnnnnnnnnnnnnnnnnnnnnnnnnnnnnnnnnnnnnnnnnnnnnnnnnnnnnnnnnnnnnnnnnnnnnnnnnnnnnnnnnnnnnnnnnnnnnnnnnnnnnnnnnnnnnnnnnnnnnnnnnnnnnnnnnnnnnnnnnnnnnnnnnnnnnnnnnnnnnnnnnnnnnnnnnnnnnnnnnnnnnnnnnnnnnnnnnnnnnnnnnnnnnnnnnnnnnnnnnnnnnnnnnnnnnnnnnnnnnnnnnnnnnnnnnnnnnnnnnnnnnnnnnnnnnnnnnnnnnnnnnnnnnnnnnnnnnnnnnnnnnnnnnnnnnnnnnnnnnnnnnnnnnnnnnnnnnnnnnnnnnnnnnnnnnnnnnnnnnnnnnnnnnnnnnnnnnnnnnnnnnnnnnnnnnnnnnnnnnnnnnnnnnnnnnnnnnnnnnnnnnnnnnnnnnnnnnnnnnnnnnnnnnnnnnnnnnnnnnnnnnnnnnnnnnnnnnnnnnnnnnnnnnnnnnnnnnnnnnnnnnnnnnnnnnnnnnnnnnnnnnnnnnnnnnnnnnnnnnnnnnnnnnnnnnnnnnnnnnnnnnnnnnnnnnnnnnnnnnnnnnnnnnnnnnnnnnnnnnnnnnnnnnnnnnnnnnnnnnnnnnnnnnnnnnnnnnnnnnnnnnnnnnnnnnnnnnnnnnnnnnnnnnnnnnnnnnnnnnnnnnnnnnnnnnnnnnnnnnnnnnnnnnnnnnnnnnnnnnnnnnnnnnnnnnnnnnnnnnnnnnnnnnnnnnnnnnnnnnnnnnnnnnnnnnnnnnnnnnnnnnnnnnnnnnnnnnnnnnnnnnnnnnnnnnnnnnnnnnnnnnnnnnnnnnnnnnnnnnnnnnnnnnnnnnnnnnnnnnnnnnnnnnnnnnnnnnnnnnnnnnnnnnnnnnnnnnnnnnnnnnnnnnnnnnnnnnnnnnnnnnnnnnnnnnnnnnnnnnnnnnnnnnnnnnnnnnnnnnnnnnnnnnnnnnnnnnnnnnnnnnnnnnnnnnnnnnnnnnnnnnnnnnnnnnnnnnnnnnnnnnnnnnnnnnnnnnnnnnnnnnnnnnnnnnnnnnnnnnnnnnnnnnnnnnnnnnnnnnnnnnnnnnnnnnnnnnnnnnnnnnnnnnnnnnnnnnnnnnnnnnnnnnnnnnnnnnnnnnnnnnnnnnnnnnnnnnnnnnnnnnnnnnnnnnnnnnnnnnnnnnnnnnnnnnnnnnnnnnnnnnnnnnnnnnnnnnnnnnnnnnnnnnnnnnnnnnnnnnnnnnnnnnnnnnnnnnnnnnnnnnnnnnnnnnnnnnnnnnnnnnnnnnnnnnnnnnnnnnnnnnnnnnnnnnnnnnnnnnnnnnnnnnnnnnnnnnnnnnnnnnnnnnnnnnnnnnnnnnnnnnnnnnnnnnnnnnnnnnnnnnnnnnnnnnnnnnnnnnnnnnnnnnnnnnnnnnnnnnnnnnnnnnnnnnnnnnnnnnnnnnnnnnnnnnnnnnnnnnnnnnnnnnnnnnnnnnnnnnnnnnnnnnnnnnnnnnnnnnnnnnnnnnnnnnnnnnnnnnnnnnnnnnnnnnnnnnnnnnnnnnnnnnnnnnnnnnnnnnnnnnnnnnnnnnnnnnnnnnnnnnnnnnnnnnnnnnnnnnnnnnnnnnnnnnnnnnnnnnnnnnnnnnnnnnnnnnnnnnnnnnnnnnnnnnnnnnnnnnnnnnnnnnnnnnnnnnnnnnnnnnnnnnnnnnnnnnnnnnnnnnnnnnnnnnnnnnnnnnnnnnnnnnnnnnnnnnnnnnnnnnnnnnnnnnnnnnnnnnnnnnnnnnnnnnnnnnnnnnnnnnnnnnnnnnnnnnnnnnnnnnnnnnnnnnnnnnnnnnnnnnnnnnnnnnnnnnnnnnnnnnnnnnnnnnnnnnnnnnnnnnnnnnnnnnnnnnnnnnnnnnnnnnnnnnnnnnnnnnnnnnnnnnnnnnnnnnnnnnnnnnnnnnnnnnnnnnnnnnnnnnnnnnnnnnnnnnnnnnnnnnnnnnnnnnnnnnnnnnnnnnnnnnnnnnnnnnnnnnnnnnnnnnnnnnnnnnnnnnnnnnnnnnnnnnnnnnnnnnnnnnnnnnnnnnnnnnnnnnnnnnnnnnnnnnnnnnnnnnnnnnnnnnnnnnnnnnnnnnnnnnnnnnnnnnnnnnnnnnnnnnnnnnnnnnnnnnnnnnnnnnnnnnnnnnnnnnnnnnnnnnnnnnnnnnnnnnnnnnnnnnnnnnnnnnnnnnnnnnnnnnnnnnnnnnnnnnnnnnnnnnnnnnnnnnnnnnnnnnnnnnnnnnnnnnnnnnnnnnnnnnnnnnnnnnnnnnnnnnnnnnnnnnnnnnnnnnnnnnnnnnnnnnnnnnnnnnnnnnnnnnnnnnnnnnnnnnnnnnnnnnnnnnnnnnnnnnnnnnnnnnnnnnnnnnnnnnnnnnnnnnnnnnnnnnnnnnnnnnnnnnnnnnnnnnnnnnnnnnnnnnnnnnnnnnnnnnnnnnnnnnnnnnnnnnnnnnnnnnnnnnnnnnnnnnnnnnnnnnnnnnnnnnnnnnnnnnnnnnnnnnnnnnnnnnnnnnnnnnnnnnnnnnnnnnnnnnnnnnnnnnnnnnnnnnnnnnnnnnnnnnnnnnnnnnnnnnnnnnnnnnnnnnnnnnnnnnnnnnnnnnnnnnnnnnnnnnnnnnnnnnnnnnnnnnnnnnnnnnnnnnnnnnnnnnnnnnnnnnnnnnnnnnnnnnnnnnnnnnnnnnnnnnnnnnnnnnnnnnnnnnnnnnnnnnnnnnnnnnnnnnnnnnnnnnnnnnnnnnnnnnnnnnnnnnnnnnnnnnnnnnnnnnnnnnnnnnnnnnnnnnnnnnnnnnnnnnnnnnnnnnnnnnnnnnnnnnnnnnnnnnnnnnnnnnnnnnnnnnnnnnnnnnnnnnnnnnnnnnnnnnnnnnnnnnnnnnnnnnnnnnnnnnnnnnnnnnnnnnnnnnnnnnnnnnnnnnnnnnnnnnnnnnnnnnnnnnnnnnnnnnnnnnnnnnnnnnnnnnnnnnnnnnnnnnnnnnnnnnnnnnnnnnnnnnnnnnnnnnnnnnnnnnnnnnnnnnnnnnnnnnnnnnnnnnnnnnnnnnnnnnnnnnnnnnnnnnnnnnnnnnnnnnnnnnnnnnnnnnnnnnnnnnnnnnnnnnnnnnnnnnnnnnnnnnnnnnnnnnnnnnnnnnnnnnnnnnnnnnnnnnnnnnnnnnnnnnnnnnnnnnnnnnnnnnnnnnnnnnnnnnnnnnnnnnnnnnnnnnnnnnnnnnnnnnnnnnnnnnnnnnnnnnnnnnnnnnnnnnnnnnnnnnnnnnnnnnnnnnnnnnnnnnnnnnnnnnnnnnnnnnnnnnnnnnnnnnnnnnnnnnnnnnnnnnnnnnnnnnnnnnnnnnnnnnnnnnnnnnnnnnnnnnnnnnnnnnnnnnnnnnnnnnnnnnnnnnnnnnnnnnnnnnnnnnnnnnnnnnnnnnnnnnnnnnnnnnnnnnnnnnnnnnnnnnnnnnnnnnnnnnnnnnnnnnnnnnnnnnnnnnnnnnnnnnnnnnnnnnnnnnnnnnnnnnnnnnnnnnnnnnnnnnnnnnnnnnnnnnnnnnnnnnnnnnnnnnnnnnnnnnnnnnnnnnnnnnnnnnnnnnnnnnnnnnnnnnnnnnnnnnnnnnnnnnnnnnnnnnnnnnnnnnnnnnnnnnnnnnnnnnnnnnnnnnnnnnnnnnnnnnnnnnnnnnnnnnnnnnnnnnnnnnnnnnnnnnnnnnnnnnnnnnnnnnnnnnnnnnnnnnnnnnnnnnnnnnnnnnnnnnnnnnnnnnnnnnnnnnnnnnnnnnnnnnnnnnnnnnnnnnnnnnnnnnnnnnnnnnnnnnnnnnnnnnnnnnnnnnnnnnnnnnnnnnnnnnnnnnnnnnnnnnnnnnnnnnnnnnnnnnnnnnnnnnnnnnnnnnnnnnnnnnnnnnnnnnnnnnnnnnnnnnnnnnnnnnnnnnnnnnnnnnnnnnnnnnnnnnnnnnnnnnnnnnnnnnnnnnnnnnnnnnnnnnnnnnnnnnnnnnnnnnnnnnnnnnnnnnnnnnnnnnnnnnnnnnnnnnnnnnnnnnnnnnnnnnnnnnnnnnnnnnnnnnnnnnnnnnnnnnnnnnnnnnnnnnnnnnnnnnnnnnnnnnnnnnnnnnnnnnnnnnnnnnnnnnnnnnnnnnnnnnnnnnnnnnnnnnnnnnnnnnnnnnnnnnnnnnnnnnnnnnnnnnnnnnnnnnnnnnnnnnnnnnnnnnnnnnnnnnnnnnnnnnnnnnnnnnnnnnnnnnnnnnnnnnnnnnnnnnnnnnnnnnnnnnnnnnnnnnnnnnnnnnnnnnnnnnnnnnnnnnnnnnnnnnnnnnnnnnnnnnnnnnnnnnnnnnnnnnnnnnnnnnnnnnnnnnnnnnnnnnnnnnnnnnnnnnnnnnnnnnnnnnnnnnnnnnnnnnnnnnnnnnnnnnnnnnnnnnnnnnnnnnnnnnnnnnnnnnnnnnnnnnnnnnnnnnnnnnnnnnnnnnnnnnnnnnnnnnnnnnnnnnnnnnnnnnnnnnnnnnnnnnnnnnnnnnnnnnnnnnnnnnnnnnnnnnnnnnnnnnnnnnnnnnnnnnnnnnnnnnnnnnnnnnnnnnnnnnnnnnnnnnnnnnnnnnnnnnnnnnnnnnnnnnnnnnnnnnnnnnnnnnnnnnnnnnnnnnnnnnnnnnnnnnnnnnnnnnnnnnnnnnnnnnnnnnnnnnnnnnnnnnnnnnnnnnnnnnnnnnnnnnnnnnnnnnnnnnnnnnnnnnnnnnnnnnnnnnnnnnnnnnnnnnnnnnnnnnnnnnnnnnnnnnnnnnnnnnnnnnnnnnnnnnnnnnnnnnnnnnnnnnnnnnnnnnnnnnnnnnnnnnnnnnnnnnnnnnnnnnnnnnnnnnnnnnnnnnnnnnnnnnnnnnnnnnnnnnnnnnnnnnnnnnnnnnnnnnnnnnnnnnnnnnnnnnnnnnnnnnnnnnnnnnnnnnnnnnnnnnnnnnnnnnnnnnnnnnnnnnnnnnnnnnnnnnnnnnnnnnnnnnnnnnnnnnnnnnnnnnnnnnnnnnnnnnnnnnnnnnnnnnnnnnnnnnnnnnnnnnnnnnnnnnnnnnnnnnnnnnnnnnnnnnnnnnnnnnnnnnnnnnnnnnnnnnnnnnnnnnnnnnnnnnnnnnnnnnnnnnnnnnnnnnnnnnnnnnnnnnnnnnnnnnnnnnnnnnnnnnnnnnnnnnnnnnnnnnnnnnnnnnnnnnnnnnnnnnnnnnnnnnnnnnnnnnnnnnnnnnnnnnnnnnnnnnnnnnnnnnnnnnnnnnnnnnnnnnnnnnnnnnnnnnnnnnnnnnnnnnnnnnnnnnnnnnnnnnnnnnnnnnnnnnnnnnnnnnnnnnnnnnnnnnnnnnnnnnnnnnnnnnnnnnnnnnnnnnnnnnnnnnnnnnnnnnnnnnnnnnnnnnnnnnnnnnnnnnnnnnnnnnnnnnnnnnnnnnnnnnnnnnnnnnnnnnnnnnnnnnnnnnnnnnnnnnnnnnnnnnnnnnnnnnnnnnnnnnnnnnnnnnnnnnnnnnnnnnnnnnnnnnnnnnnnnnnnnnnnnnnnnnnnnnnnnnnnnnnnnnnnnnnnnnnnnnnnnnnnnnnnnnnnnnnnnnnnnnnnnnnnnnnnnnnnnnnnnnnnnnnnnnnnnnnnnnnnnnnnnnnnnnnnnnnnnnnnnnnnnnnnnnnnnnnnnnnnnnnnnnnnnnnnnnnnnnnnnnnnnnnnnnnnnnnnnnnnnnnnnnnnnnnnnnnnnnnnnnnnnnnnnnnnnnnnnnnnnnnnnnnnnnnnnnnnnnnnnnnnnnnnnnnnnnnnnnnnnnnnnnnnnnnnnnnnnnnnnnnnnnnnnnnnnnnnnnnnnnnnnnnnnnnnnnnnnnnnnnnnnnnnnnnnnnnnnnnnnnnnnnnnnnnnnnnnnnnnnnnnnnnnnnnnnnnnnnnnnnnnnnnnnnnnnnnnnnnnnnnnnnnnnnnnnnnnnnnnnnnnnnnnnnnnnnnnnnnnnnnnnnnnnnnnnnnnnnnnnnnnnnnnnnnnnnnnnnnnnnnnnnnnnnnnnnnnnnnnnnnnnnnnnnnnnnnnnnnnnnnnnnnnnnnnnnnnnnnnnnnnnnnnnnnnnnnnnnnnnnnnnnnnnnnnnnnnnnnnnnnnnnnnnnnnnnnnnnnnnnnnnnnnnnnnnnnnnnnnnnnnnnnnnnnnnnnnnnnnnntttcagtaacatagcgaggaccctgtctctacaaaaaaaatttaaaaaataaaatttagctgagcatggtggtgagtgtctgtagtcccagctacttgggaggctgagttgggaggatcgctggagcccaggagtttgaggctgaccaagccatgactgcacctccacactccagcctgagacagagtgagaccctatctcttaaaaaaaaaaaaaaaaaaaaaagggccaggcgtggtggctcacccctataatcccagcactttgggagaccgaggtgggtggatcacctgaggtcaggagttccagaccagcctggccaacatggcgaaaccccatctctactaaaaatataaaacattagccaggtgtggtggtgcgtgcctgtaattccagcaacttgggaggctgaggcaggagaatcgcttgaacctggggggcggaggttgtagtgagccaagatcgtgccattgcactccagcctgggtgacagagcaagactctgtctcaaataaataaataaagctggaagtagaaggggaggatgagattggtgggttctgagggctgggatggccaaacacagttctgctgtggtcaggattatgcagagatcaggggcagaacaaccaggagttatggaccagaggactgcaggaatgtggacgctgagggccaaagcaagaaaatgagtgactgacagattaacactcaggtgtaagcaggacagaagtctatgccgtggtccagattgaaggggcgggggggggggtcagaaacccaggaagcaagatgtctaggggcctggactattgtgttatggagccaccagcgtcctcttactgtgagttgacacacaactgaatttggatcctctgtgtccgaacttgggataagcgggtttacctttgctcaaatcatcatttttttaggtttttcgtaggctctgtggctttcacctcacatctcaaaatgtacatcccttattaaatataattggctattatatatatatataaaatatttgaaaggattttaatcattttacttttggaatgatttggctctgagtaactcatccaatttgtaactggctctaatttctgggcaatcatcttgcacacgcacaaaaggattcttgtgagctaagaaaatctaaggtatctttttttttttttttttaaagacagagtctcgctctgtcaccaaggctggagtgcaatggcgggatctcagctcactgcaacctccatctcccgggttcaagcgattctcctgcctcggcctcccaagtagctgggattacaggcatgtgccaccacacccggctaattttgtatttttagtagagacagggtttcaccatgttagtcaggctggtctcgaactccttacctcaagtgatccaccggctgtggcctcccaaagtactgggattacaggcgtgagccactgtgcccggcctggtaccaattattttcaaatgaaaaactttttaatgtttcattgaaaaattaatgacgtttacttgacgtaacatcctgtacgcatttaaatacttgtcagggaggttgatataatgttatgtaggcattcaattaaatgtttattaacaccagatacagcatcttcactttgtatgtaggaagccaggcaattttttcaggtttcatacagttttgcaggcccagagaaactcatggaccctcagcattttgcccgtagttccaggtgggacactgcctgtgttgatgtgtggagtgaggctttaaaggaaatgaggtatcaaaagctataaataatccctcctgggttgagcagattctgtgtggaagaatgactgtcttacctgcactatcatatttaaccctcatgataaccctgtgagaacacgatattatgatcccttatttgatagaacaggaaatggaggtcattcagttggaacacctgtcatttgagactctctgtctctgcctgaccttcttttgatcttttataaggtgccacctcagttcccatttatttggggcaatattaattttggttaaggaatctaggcaggtgtatagcaagaacttagagccaagagtaagaacctagacagactggtgagtcagtcattgttagaccctaactgctgtcagccaggaagatactttaatttcaattcaggactttttctttagcacctggcttctgatacgctgcccgttaaagtagcagccagccggttgcggtggctcatgcctataatcccagcactttgtgaggctgaggcaggaggatcacttgaggccaggaggttgagaccagccttgacaacatagcgagaccccatctctaaaaaaaaaatggaaaaattagctgggtgtggtggtacacacctgtagtctagctactcaggagggtgaggtggaaggatcacttcagtctgagaagtcgaggctgcagtgagctgtgattgctccactgcactccagcctgggtgacagaatgagatggggtctcattctgggctcaagtgatcctccagcttcctgtctcaaagaaagaaaacccaaaaaaaccccacaaacaaataaaataaagtgggaaccactcctggatcccctaggtggaggacatgtcgaagaatacccttggctggagggggatggagagaatggtattcaggggaggactgtgacatcatgtgaatagtccccggcctaggacccatgggaaggtgactgtctctttagaggctcagtggtggaggctcactccagggaggctcagcctccatcaaggattgtccctaatctttgtgggcatgtggtggaatatgagttgctttcttttttcttttgtttgagcctgaatgatgagagttcacatatgcagatactcaggagtgtacatgccaggggtaggattgccagagcaagatgaaatacagcaacaggaggtatagaaatacctcctctgtttcttgcccttccctgagatatataggaatgttctccgattccatcagcccctctctgggcacctggaaggtgcttattttcatggttaggccatcagggcagatgtaaaggcaattgttccatgtgtctgagggcagcgagcagcctgctgcttcatctctctgagtgttctgattggaatccatgcatttgtagcaatattgccttcagcttggagaacgatttagggagagggttggcggttgaaagaggaggggaggaggggaatcttgctagtgtgaatgaggccaggataggttttcgtcaggacttagtggcttttaaaagtctttttgagctgggtgcagtggctcatacttgtaatcctaacactttgggaggctgaggcgggaggattgcttgagcccaggagtttgagaccagcctgggcaacatagcaagaccctgtttctgcaaatatttttcttttttaaaaaaaactagccaggcataggggcatttaaaaaaaattagccaggaggtggagactggaggatcacttgagcccaggagttggaggctacagtgagctatgattgcaccactgtactccagcctgggtgacagagtgagaccctatatctaaataaataaataaataataaacataagtctttttgtaaagatgaacagacctcaagataatggttatctctgacggtggggattctgtcagggaggggcacacagggcttctaagaaataggactgataatgcctgtttcttaatctggatgatgagtacagggttttcatttaattattattttttaaaaatgtagacatatgtttaatgtactctttatatatgagaaatttcacaataagaaatcttcaacattgtaagacacatattcatgtttcttttatttcttatttgatttaggtgagcatagctaccccaaaacagaaaccaaaaactccattttgctttggtaagtactgagccaggggagggactcatttaatattgacatggcaacttcctcttttgcatggagacagtcctgtgatcacatgtgactataccctgtgagtatgagtgacttaaatcacagtgacggtcctggacgtcaagtgatattgttttccctggtcttgctgcaaaggttgttaataacataaggacagaggttcagggactagtaacatttctgttttctttcttttttttttggttttagttttattttttaagttgacaaataataattatatgtattcatggggtacataatgtatagagtaattagcatatctatattagtctgttcttgaactgctataaagaaatacctgagactgggtaatttaaaaagagaacaggtttgcccgggcctggtggctcacacctataatcccagcacgttgggaggccgaggcgggcagatcacctgagatcaggagtttgagaccagcctggccaacatagtgaaaccccatctctactaaaaatacaaaaaaattagctgggcgtggtggtgagtacctgtaattccagctactcgggaggctaaggcaggagaatctcttgaacccaggaggcggaggttgcagtgagctgatttcaggccattgcactctactccacctcaaaaaaagaaaaaaaaaaagaggtttaattggctcagtgttctgcaggctctatggggccagaggagaagcaagaaagagagtggggaggtgctatgcatatttaaataaccaaatttcacaagaactcactattatgacacaacagcatgggggatggtgttaaaccatgagaaaccgcccccacgacccatcatgatccagtcacctcccaccaggccccacctccaacattgaggattacaattgaacatgagatttgggtagggacacagatttgggtggggacagagatccaaaccatatcaatgtccatcatctcgaacatttttttcttttaataattgtccatatgcatttcagttttcttgatgccacaaggcaggtgcaaaatgtccactataagtttctgtgaaccttattttagagctgagaaatgttgtgctcagaaaagatggaggactcagaggagacgcagatggcagtgccaggaaggggataagacaaaggaaggagaattctgttaagggtctcagttgcccaatagtgacatgttgggggatggtgtaggaggcagagtcaccgtgcatgggtgcctcaagtcaggaagtggtcagtgaattcagtgaatccatcatcaaatagttacttggctcctactatgttctcacagctgtgctaagtgctatgagcaaatgctaacaaatagtttctgttgcctatctggggtggttctgaatgtaagtttcacaaaggcaggggtattcctctgccttgtcactgtggtatcctcagcacttaaagatgtttcctagcgcatagtaggtgctcagtaaatatttgtcaaatgaatgaatgaacggatgaattctgcatctaccccatgagactcacctcctacagttcaagcttatgctaagagaataaagtattcccttgagcgattctgtctccccacctcagatttgttcagacttctttggcatgctcattcttctatttcttgcaaatttcatagctaagctcagaaatgactctcacgttttgtggttatcagatctgaaaatatatatatgtaataatagtgaatgtggaagtaaattgttgacctaatggaatgctcagaggaaagaacaggttgagagtgaggccaaggtcacagatttgatctcaggaaagctttgttctatttcccaaccacagacaactctcccagtccagaccagttgtgccagaggagaccaagcatgggtccaaaattctgtatataccgtgatgacagtaaatgtattagcaccgccagaatgcggttcacagttgtgtcttgttgacggcagaccagcagcctcatcaccgcagaacagcacactgaggctgctgttaacatggtcaggtgttgttcctgtggccaatgggatgtttttaaaggtgggaaagagagtgagcaggtgtggcctggggcttcctagatatccaggcaaatgacttagcatcatgggagatttcttgttctgctttgtggagttcactcatctcactccctcaaacaccttagctttgtggagacttgttgtattgcttgtattctgacctaggaatgtcttcccttcttttctgtggcttttgtagttatcaatgccctgtctcagagatatttccttcaagccaatgatcagaaagatatgaaggactgggttgaagccctgaaccaagccagcaagatcaccgtaagtttggtttcttctgttttctggtggtagtaaaagtgcctcttcccaggctatggccttgttggggttggggaaaactgagatggcagcggggactttcccaggagcctggtctgtacccagttctctcccacctcgtctttttccttgtctgaccaaacacaagttgaactgagagtctgagtttgaatcaagttcaaggggaagttcatggagcgtcccctttgtgcttcctgggagggctcccgatcagtcatgtttcgggtgattctgggatgctgattcagaatgtggtaggattggaaaatggattggtgactgtgaaaggtcaagtaaggggaaaagcatatggggagggaagtcagaactttttcccagcttgggggatactcttcttactttcagaggctgcctgcagggtcagtccaagccatccgcctccctgtcctagaaaagccttctgtttaaaagcatcacagagctagttcatggactgtcctacgagtgtgctctttttccttgagttggctaatgaagaattcctttctttttccttagagatatagaaaaagaaaggaagaagggtaggaaggatggagaggggaaactatgttttggaaaaaactagacttttaatcaataagacaggcagactcctggcttatatagatcatggcttctttgctgaaaagtttgtttctgtatcatacagtcagaaatgcttatgtttgaggggcttccagtagtgactattacatgctgcagcaaattatcctcccagatttctcagggttcctgtgaacaactgtatagaagaaatttgtacacgtatatagtattcatattgctagacccaacctgagtgtaattgagtctcctataagcagttttgctgattagcttcttattctgataaaccttggtaaacccgtgaaaagagagagtgatgaaaagagagaggatggatggctgggtgcagtggctcacgcttgtaattccagcactttgggaggccgaggtgggtggatcacctgtggccaacatagtgaaaccccgtctctactaaaaatacaaaattagctgggcgtggtggcacacgcctgtagtcccagctactcaggaggctgaggcaggagaatcacttgaacctgggaggcagaggttgcagtgagccgagatcgtgccattgcattccagcctgggcgacaagagtgaaactccacctcaaaaaaaataaaaaataaaaaaattagccaggcctggtggcttacacctgtattcccagctacttaggaggctgaggcaggaggatcacttgagcccagaagtttgaggctgcagggagttatgatcgcaccactgtacttcagcctaggcaacagagtgaaagcccatctcttaaagaagtctcaggtagtgtaaacagctttggaaaggctctgcatgttgatctgaagcactgcatgacaccggagcataagcactgacaaacagtgttcttcgggattttgagaggaaacacagcagccaagcttctgtgcctccttttctggccactgggaactctaaaaagttactttctggccaggcgcggtggctcacgcctgtaatcccagcactttgggaggctgaggcgggtggatcacaaggtcaggagttcgagaccagcctggctaacatggtgaaaccccgtctctactaaaaatataaaaactagctgggcatgttggcatgcaccgtaatcccagctacttgggaggctgaggcaggagaatcacttgaacccaggagctggagattgcagtgagccgagatcgcgccactgcactccagcctgggcgacagagcaagactccatctcaaaaaaaaaaaaaaaaaaaaaattgttatttccctccttctttgctgggtttcaggaattcatctgggtcatttaggggaaatttctgcagttccatggtgattttaatcactaaatatcaactaaaaatcaacatccctaaaaatgtggttacataataacagaactcacagaaagtgagaaagagtagcttaggtaggtcgtgacatgcagcaacaaggagtcaggcagttctagagccaaatcacttaattttaatgagcttgagttgacctcatctataaagtggagaaaatcatgcctggttgataagattagtgataatgcagcaaagagcttatcagtgcattgcctggcactgaatggtggcccagagaaactgtaactgctggtatctctcagccagaaagaaaatagaaggcggaatttctggcctgatttggaggggtagggagggggcagaggacgtccttgtctatgtaaactgagtgtgcagtccaggaagagaaggtctcgttgtctttgtgggggcccagcataatcagggtgctcttattgttttgaacagacaccaaatgacagggctgtcatatagctctgagctcggatccttaggtctttcttactctgaaagctgtagaagtgggagaggaccttagcttttctctcgaagtcccggtgacgtcccggcagatagatgtagggtgttgcgttctcctgaaggtggggcattgtgatgctggggcactggtgggaagtcagagtttagtagacattcagctgtttttttgttttgtttttgttttgaaacggagtctcgctctatagcccaggctggagtgcaatggcgtgatctcggctcaatgcaacctctgccttctgggttcaagcgattctcctgcctcagcctcctgagtagctggggttacaggtgcccgccactacgcccagctaatttttgtatttttagtagagacggaatttcactatattggtcaggctagtctcgaactcccgacctcaggtgatccacccgcctcggcctcccaaagtgctgggattataggcatgagccactgtgcctggccgacattcagctgttaatcctggctttgggtaaatgactcaactgttctggacctctttttttttttttctttctaacaaaatgaaagatttcctcagcatttgcagactctagtataaatgagtgaagtgggcaaggaggaggaaacagggcaacaggaatgaggataagtgacatttgacccctggcctctcccgttctgctggggagaatggtagggactgtgcaaacacaatgtattttctatctaaaagggaactgctgcatagctgaaaatctggatttttctgtgaaatatcccaaaacttagatgcagattttaaaaaatactgcatgtgactaacaaaacattgtttgggcaaagtcagtgggtgggccaccaatttgcaacctctggcctgtgatttccaactaacaataaaaattttatgatgatttgatcagctgtggtaccatatctctgtcaaggaagagcaaagatagctcattcttccaaaagggctctgtgtataattattagtaacaacgtgggaagccttaattataatattttgtaatatgtttttctttttagttgtgtttctaaagcatttaatgtactctatcatttgataaccacaacgatggttatgataaatattattccacttttcattttatgcatgagacggtttaggcctagaaaggtttgatggttgccaaaggtctctcaggtggttcgtgagaggtgaagggttataccacacatcttctggctccagacttcatggaccccttgttctgtctctacaaaggcatgcatgcatttttacctgttcaatctgcccagaatgccttctcccagcttcatgttcctggttccttttatttagttttttattttgtatttttttcgagacagggtctctgtcacctagcctggagtacagtggtgtgattatagctcacttcagcctccaattcctgggctcaagagattctcctaccttggcctgttgagcagctgtgtgctaccacacctggctaattttttttttcatttttagtagagatgggatctcactatgttccccaggctggtcttgaactcctgggctcaagtgaccctcctgccttggcctcccaaagtgctggggttacaggtgtgaggccccggacctggcccccatctcctgcttaccctccaggttgccgtttgagtgtctccctgccttctcctctagagacctccctgcccactctgtttccagcaggtcccctgctgtgcgctgcctcagctctcttgatcttctttgtgccactcaccaccatttgtaattactctgtttgttttacgtttttttttgtcattccccctactagcatgtaagtgccgtgaaggtggggacccacgtgtgtttcgcttgacactttatctttggtttctagccagggaagggctggctcataagtaggcgctcaagaaattcctggagtcagtttgtatctgtgtagggggagggcgttgctggttgagatgctcatattcagatttggactgtggaaggcttggggaggacacgcaagtctgactgtaatttggcacatgagcttttctcacggcagccccattctgttttgggctccccatgtttcctaaatgttctgttccccattgattgttgctgccgctcaccccaggttcccaaaggtgggggcctacccatgaccactgaagttctcaagagcttagcagctcctccagccctggagaagaagccacaggtggcctacaagacggagatcattggaggggtggtggtccacacacccatcagccaggtgaggggcctgactggggctgcggggggagtgggggtgtggaagtgtccatggtgtgcccatgatgtgctcggagcactgtactggggaaaaggagggtgggggtggggggcagctggtgccagtggagccatcaggaaagtacagggcatgttacatccccattcatgggtgttagtgacggcagtgcggaagtggaggctgctgcatcttgaagccatgtggcctgtgcagttctgtgccaaacacgggagacacagaagatgagggtttgtgaaaccataggaaatgggacagagcatggcaaacaaggctggaaaccagcctggtgtccctgctggttcacattccctatccttccctttctcctgggtcggcccaacctccctgatgctggttctgtgaaagtacccagtagagtgcatgacagagaaagaaaaggtttattttcctgttttaattatttatatttatttaagtttttttttttttttttttttgagatggggtgtccctctgtcacccagcctgaagtgcatatacacataatcacggcttattgcagcgtctgcctcctaggctcatgcaatcctcctgcctcagccttcctaggctcaagtgatcctcccacctcatctgggaccacaggcatgtgccaccacgcctggctaaatttttttgtattttttgttggagatggggttttgccatgttgttatttaatttttttagagacaaggtctcgctgtgttgcccagactgaagtgcagtggtgcaatcatggctcacttcagtgtcagactcctgggctgaagccatcctccaacctctgcttcctgagtagctgggactacacgcctgggtaattcttttttttaatttttaaattttaaaatcaaaattaaacaaaaattttaaaacaatttttaatttttttgtagagactgggtctcactgtgttgtccagtctggtctagaactcctgggctcaagcgatcctcctgccttggcctcccaaagtgttgggattacaggcgtgagccactgtgcccaccatttatttcttctttgacttagggcaaagaggccagagattcaggcagagggaggtaggtggggctgtggctgcatagagggagggaggcgctgatactgacactgtttccttgcagaacggtggggatgggcaggaagggagtgagcccgggtcccacaccatccttcgaaggtctcagagttacatccccacgtcaggctgccgtgcttccactgggcctcccctcattaagagtggttactgcgtgaagcaagggaatgtggtgagtgtcagcacaggggctgaattggggttctggtgactcctcagagccagtggctgtagacatagcagaggtgagaggggattgacaggaggtgcctcagtcctccatggagcctccacctttgagggtgagattttgggactgacctttggctcccacctgtcagaggtgttgcccctgatatgaagaagcccttgcccctgctgaatgtgggagccggacttccatggggctgggtccttgggagcttagcatgagtacaccctccacaatgctgggcacctctcgctaatggtctgccttttatttttttattacagcggaagagctggaaacgtcgcttctttgcacttgatgactttaccatctgctacttcaagtgtgagcaggtttgtagtagctttgctgcccttctgagaggtcatggaaactaagaggtgcataggtgcacacccacaggagagcgtgcatgagtggagatgtgggcacacaaagacttcaaaggcgcctctgtcttatctccattctgtgcacacatctttacagtgacactaaagtgtcctctctgcagtgagctgctgtgtggtcagagtcatagctacacaacatcttcttcttatatttttttgtcttttttcttgtttttggagacagggtctttctctgtcacctgtcacccaggctggagcacagtggtggattttttgtagagacaggatttcactatgttgcccaggctggtcttgaactcctggcctcaagcaatcctccagccttggccttccaaagtcctggtattacaggcatgagccactctgcccagccagatttttttttctcttgctgattattttgagaccagattatttgtcaacctgattttagccaaccatctctgagaaaggggtattggtcagctggtctgggtcgtgatatgacacagacagcctcacttacctgtctttctgttctttccaccaggaccgagaaccactgcgcaccatatttcttaaggatgttctgaagacccatgaatgtctggtcaagtctgggtaattgtgtctgctttttctcttctaatccaaacctccatttgtcctcttaaatctccctttactacccttcagagactctatgcaagagtcatcttcttccaagagccaggcacaggagcctaacaccttgtggctgactcactgcatccaagctaacacagggaggagaccgccctgggcacacttgccctcttcccataccttactctggctcctaagcagataggcctacgtaatagtttctggtgggcaaaaagaaagggtatagaaacaaagagtggggctccgaagcttctcaggtgttaggattagatgctcaatccctagcagaacacaggctcagaggagagaccacgcctctaggtcactcacctcagtgcttctggtcagatcactgtactagtgcctcttccctgaccttcttattccttttctcctccttttgaccctgatgtcccattaacacaaggtgattcatagcatctctgtgttactcccactgggaaggaagaacaggtattttaaagggattcctctgtccactaggaaatagttaccttccaagtgccactttgcataggatgagtttgggacctggcaagggatctcctaggtccaacaccaaatacagatgcctatagaactaaactttagagaccctaagggtattggggcatccaaaaaccctttttctggccaccaatctgcagtctttagagacagggtgtttgtgtccctccgtctcatggcttgtacaagcagaaccctcagatatcatcaggaaagctgttcacagcaggccgactcttctcccatgaaggcacaaacagtcttgcatgaaaacaacatgctgtgtgacccaagggggcagagacagaagcactctcccgagtcttgcaaatggcagttgcagagtacagaagactggggaggttcccagtgactatttataattcgggaaagtagctatagatggaaattccagaagtgtggctctagaagtaggcagagggaagattgggcatgatgagatccttgattgtacttgaccctggagggcccttgcagatgtgagaccacctgggcacatgggggaagcttagagaaccataaggaacttacggttaaatcctaagaatgccttgaactttctctaactctctaactctgccagagtcacactaaactgagttaaggaagtcagggactagcagggaaggaaggtccttagggctctgcagcttccatgcctgttagactgcttggcctccctggaacccagtccagggttttaggatatcttgataatcaattaatatttgttgaaaggcaccatgtagcctggtgccgttttaaaaaaatatatatctttttaggccgggcgtggtggctcacacctgtaatccaatcccagcactttgggaggccgaggcgggcggatcacctgaggccaggagttccagaccatcctggccaacatagcgaaaccccttctttactaaaaatacaaaaaattagccgggcatggtggtgggtgcctgtaatccccgctacttgggaggctgaggcaggagaatcgcttgaacccgggaggcggaggttgcagtgagccaagatcgtgccactgcactccagcctgggcaacaagagtgaaactctgtctcaaataaataaataaataaatttttacattttttaaaatttctatcgttttgggggaacaggtggtgtttggttgcatggaaaagttcttcagtggtgatttctgagattgtggtgcacccatctgcagcagtgtccacggtgcccaaatgcatagtcttttatccctcacccccctcctgcccttcccaccctgagaagtagatgtgaaaggagtggggatttcccacctgcttttctttcacctcctcaatagttgtttatgtgactttactggctatgcatgagtagaatttgaaaggctaagacattttagccagaaagaggcattttttattcagaaactcagaaagtaatcatagttggtgaaatttgcttcaagtgactattctgtgacatacattatgccggatgccttctgtaccttataactaactggtctttgtagtgaccagcctgatcaagggggtcctcttatttgtctctgttttatacctggggtcacaaaggctccccaagtttttacaacattctcaaacatctcttccctacatgtagtcaggattcaccccaggtctatctggcccctatcctgttgttcttgctcatggatctctggtctcatgcactcctttgcccaggtacctgtggcactggccgaggtagtgccattttcttgcaggctttctcattcataaagccaaccccacctgtgatcagtcctttccaactcttggcatataacacacaatctaacatctgatggtacagttttgcttccttatgttctttttttgttgttgttgagatagagtcttgctctgtccccagattggagtgcaatctcagttcactgcagcctctgcctcccaggctcaggtgatcctcccgcctcagcctcccgagtagctgggactatagatgtgtgccaccacacctgactcagttttgtatttttttttatagagaacaaggttcaccatgttgtccaggctggcctagaactcaagtgatttgcctgccttggcctcccaaagtgctgggattacaggcgtaagccactgcgcctggcccttatgttctttcactgggtaggaattagatcttttactccttatgtattccccgcagtggctggggatatacgcggcaggcatttaacactgggaaataacttgggctgctttgaggtttgtcactgagcatcatctactccccgccctcttccttgcagaagtcaggatttcttttccaaaacccacacccagcagtgtcccctaaaggagtgccctgaggtcatctcctctccccttgctttcctcctctttagctctttgtctcctgggccccgcacagtgaggcaaggagcaggagctgagtgaggttgatggggctgctgtgagggtggaggagacggtttagggagcggagagttggctcccttaggagaggccaatggcagtggagtaattaaaagcataggctcactgggttcagtggctcatacctgtaatcccaggactttgggaagctgaggcaggcagattgcttgagctcaggagttcaagaccagcctgagcaacatggaaacaccctgtctctatgacaaatataaaaattagccaggagtggtggcatgtgcctgtagccccagtgagccatgattgtaccactgtaccccagcctgggcaacagagcgagaccctgtctcaaaaaaataaataaataaagcagagactctggagtcagacctaggttccaaatctccagcaacttggaggagtcatttaagctctgaccctgagtgtgggtctgggtttcctcatctgtaaaatgggggaagtcttaagtgccccccggggctgttgtgaagattagatgaaataatctacaaaaaagcacccgaaacggtgcttcccacaaagcacttcatacaccttagagggaaggagggaggcaggaaggaaggaaactgtaggagatggtggtggtggggttggatattaggcaggaggttttggagggaaaggagcttgttagaactgctggtgggagaggggcctggggagggtccatctggatggcaaagcctcctgagaccctctaggaaatgaagctagaggaaacccctggagtgtttttcaaggcaggagctgaaggaagaatggcttggaaccaccccccacccatcttccttttttatggtagagggcactggggtcttaggacatatcgagtcctctctgagtatgtcagcacgccataacattctttctctttctctgtctagtgatctcttaatgagggacaacctgtttgaaataataacaagctccaggaccttctacgtacaggtaaaatgctcccttccagaagactccagcattctgtttctgtgaatggtgccctcacaggccgtgtcctttcctttgctttctcttttcatttgcttgaagtttctaggcagtaaatttagcccctgagagtcagtctgagtcccatttcatcctaaacaggatgtttgccaaaagcttcccaaccataaaataatgaaagcaggttgagccgctctactgaggaatgtgagtgtgtaccagttgctctcagctgctgggctccagctaagcagagaaaaggagaaccggtcaatgatttcacttctcctttggagggtatttataagtctcgtctgtgtgtggacatcactgtgtgcggaaggacaaaagcacagagggccctgtgcaggcaccaggtgcagagcccagctgcacagaggaagccattgttcaggctctgatggttcacttatcaggagcttctcccctccacccacagctctggagttctcccaactccttctaaagtcataggaactagaaaggcagatttccaagcagggactagactttcagggccaagtcctaacccagcttgcctagcagtgcacagagagtgccttgattcgcagccccgtggtgatgctggacttttagtattgaaactgacacttggccaggcgcggtggctcatgcctggaatcccagcattttgggaggccgaggtgggcggatcacttgaggtcaggagtttgagaccagcctggtcaacatggtgaaaaccccatctttataaaaatacaaaaaaattagctggacatggtggtgtctgtaatcccagctgcttgggaggctgaggcaggagaattgcttgaacccgggaggcagaggttgcagtgagctgagatcataccactgcactccagcctgggtgacagagcgagactttgtctcaaaaaaaagggaaaaaaaaagaacagaaataaaaaactgacaagtaagcaggttggtttaaaggtgtggtttcccaactaaagcttttcaagctcccgctgccctttcttctgggcctcgagtgtcactccctgttaagcaacctcccttccccaaggagctggtccgctttcccatttcttgggcagcaattcctgtcacaactccttccgccgagcccagcacgtgtttgagtaacttagtcatctcggggctatatccatttggacaagcacataccatccaggaagagacagcggagtgggggcttgggagtgaactggagctgtggaaagggctgccatgggcatcggagctactaattcaccagcaacactgccactcagggacaaggtttaacctgtagattgctctacaagtttgtagttcttgcattcaacagatatttgtagagtatcctcagagtgctgggcattttgtctcaggctggggacaccaggttaaacagaacagatcccgaacccaagagagagagagctcgtcaagtccataggcagttaaaatgtggcatggcgcaggggagggagtgctgggggagatggagcacaggggagtttgcagacagtgaaacgattccgtatgacactgtgatggtgggcgtgtgatgaagaacttgacagcacaaagaattgacctaatgtatgcaaattgagaaaaaaatttaggaggtcaagtgatcctagcaggaaatgcagaatgtgacagtaatcgaaatgtattacaggtcctccctgaagtgggtaggggaatacaaaataaaaaaaaaaatggtgtgataagtgctactgccattagactgaaacgtgaaccataagcaggtcgcctcacccagtcttagggagttggggagggtttctgaagaaagatacagctaagctcagtctgttgggggaaaagtggcccaggcaaaggaaataggaggtatttttttaaagcctggtaataaaaggagcaaagggccaaaaggaggctggacagttaggcacggaggaccctcatatgccttattgaagagctcgtattttatccttagaattaatgcccttagaggttaaacaaagggcttgatctgatctgccttgccattaaaaaataccacttgggcaagttatttaacttcagtgcctgttttcctcatctgtgaaatggagatgatgatcttcaaccccagcccttttaatgacatgctgtcaaggattgcctggccctgtgcagtgtggaggacagaagagaaaaggctaagataggatgagagagaacagtttgaaggctgttgttaataatttagtgaaggataaaggaagcctgaatgagggtagatggagaaaagtggaaaatttgagagatattaaaaaggtatattttccaggacttgagagtcagtcggatgaagggagagaggacaggtatgcccggatgtttggctggagcctcaggatggctcatggcaccagtcattgtaacaggagcatgggaggaggagctgttgagaggaaacacaaggttagcataggtggttcagagtttacagtgcctgctggacatccaaggagatgtgctatgaagaccattggatacacactgcttggcatgttgctgacactaaataaatatttgctaagggaatgattgtgctggttgagttcaggagagagctttggactaaagacagcaatttgggaaacacgaaacccaaccaaaaaatgttccaaagataatctacatgagtgtatgcacatttaccagaagattctaatcaccccatcttccattgccttctgcttcccacatttctgggataagagaacactagcgtcacactgaataagtaaacgagagggaggacaaatctgtttacagcacctaactcaaaaaacagtggaaagagaatagtatagattaaaaatcacttaaaatatttatcaattcattaaaaatagcaactatcaagctgggcaccatgggatgcacctgtcgtcccagctacttgggaggctgaggcaggaggagagtttgagccctggagtttgaagttgcagttagctatgatctcgccactgcactccggcctgggtgacaaatcaagaccctttaaagaccttgtctcaaaaaaaaatgagcaatcataaactcattataagttaataaaacagattttgtgaaaaaaacatatttctaaaaaatagcaagaatagtattgtttttacagttttgcacatctatctttaatggctggcataatagaagacaacaggattctcctatctgcttctgcattctatctgtggccatatgttgttttgattgaagaatatggagaaaatcttgcctcacacagatgtgtatttggaaaaaaggaatattttaatagcctttttagataattgtggatattctttgattctataccaaaacttgacaaatgttaatttcttaatgtttaggtacaatgtacaatctgaagccatatcaagaaatttttatactcttacattaaaatccattggtcaattttgcactttgaatagatactttttatccatgcatggtttttaacagtatgcattggtcatttggaaaacaatggtctcactgaggtatgcagatattcaaaatgttgacacattttattatgtactatccaaaatcacatcattaagatatcaccactaatatcattaacagtactttgagtgtagaaaactattaagctnnnnnnnnnnnnnnnnnnnnnnnnnnnnnnnnnnnnnnnnnnnnnnnnnnnnnnnnnnnnnnnnnnnnnnnnnnnnnnnnnnnnnnnnnnnnnnnnnnnnnnnnnnnnnnnnnnnnnnnnnnnnnnnnnnnnnnnnnnnnnnnnnnnnnnnnnnnnnnnnnnnnnnnnnnnnnnnnnnnnnnnnnnnnnnnnnnnnnnnnnnnnnnnnnnnnnnnnnnnnnnnnnnnnnnnnnnnnnnnnnnnnnnnnnnnnnnnnnnnnnnnnnnnnnnnnnnnnnnnnnnnnnnnnnnnnnnnnnnnnnnnnnnnnnnnnnnnnnnnnnnnnnnnnnnnnnnnnnnnnnnnnnnnnnnnnnnnnnnnnnnnnnnnnnnnnnnnnnnnnnnnnnnnnnnnnnnnnnnnnnnnnnnnnnnnnnnnnnnnnnnnnnnnnnnnnnnnnnnnnnnnnnnnnnnnnnnnnnnnnnnnnnnnnnnnnnnnnnnnnnnnnnnnnnnnnnnnnnnnnntcctgagtatctaagagagctagaccaaagagcagggcagatccatggtggagaagactcccctagacagaagagaaagacttgggttagattctaaccacttagatcttggtcgtttaactgtttaactcagatgtcatatttacgtataatttgtaccctgtgatttctcacactgtagtagtcttttctgttaagaaaagctaccattttttggacacctagatgtcccaggcatagtgctaaacaacttacaggtagtataagttaaagtttatcactttgtagtataagtactataagtagtataagtttatcacttaaatctcagccgtctctgaaattatctccagtttacacacaggaaaaagaaggctttgaaggtaaattatttgtgcaggatcataataaatccagtgaattatggaaccaactgggaagcaccaggtgctggagcaagatttgccaacttgggttgtttgcgagcagcctggtccaggccgggtgcagtggctcacacctctaatcccagcactttgggaggccaaagtggaaggattgttggagcccaggagtgcgacaccagcctcagcaacccagtgagacccctgtctctaaaaacaagcaaaagtaaaccaaaagaaaagaaaaaaataagagcagcctggtccagaacccatgatatagagggtgtggtcacagacaaccagggaagtctgactctgttggagaagaccaacttggggtaattgggtgtcttggcaaatggatcatggtgaccaaaaatccaagatctggaaataaccaggtatctaagcaggtagaaaggccagtgatttcagcaagcttgtaagcaggtaaacagttctcagttctgggcaaaagttcaaaatcacatttcaattcttgagctaccaggcaagtagaggtcaccatttccccatttcccattcatagaatgtcaagggaattaggcagtttatcaagagggaaattagttattcgaaatgagaaatgtggtgcaaactggtcttagcttggcataagcccagttgttagaactagggtgctatgtcaggacaagagtagcaataagtggactcaagtgagttgcagagtgttgcattagagctcttcggatacttactgtttaatttagactacagggtgaatgatgtcacctagaactatgtagtgtgcaatctacacaatcgtatgtggcagggctgtgtctagagatggcactagttcttgggaaaggagggttgcagaggtggagaacagaatgaaggaggagttgcctaaaaattttggatagcggcaatggcagtaaccagaagtagatatggaagcctttatggcctctagaattcattgcttcaaaccattgtatctattatagtgctgggcttatgttagatagtcaatagaagctcactggactacaataaaactgcaggctgcaacgattcattttaatactgtctgtcctactcatctcaaaaactgccctcaaggacagaagccctgctttttcttttgaaccgagcaccagaaacaggtgcacacacataagcacaccaggaagagatgaagctatgaccttggcacttccttttttgttttactgagtttaaagtatgtttttagtctcatggtaattcatcatgggtgggtagacttcagctatatatatttttttaaacctctgtttcatgaagctactttgtgatgtggttttacgattttgatgaaagctaagcacaggctttccgtaaaaatagatatgtacataaccataatttttgcatacaattttggagtttcattgagtttttgtttctcatgaatcccagttcttaaaactactaggagagattataggccaggcctggtggctcatgcctgtaatcccagcactttgggaggctgaggcaggaggattgcttgaggccaggaataccctgctccaaaaaaaatttaaaaataaaacattgtaattgtgatctcaataaaataatattgtttcttctcatatggaattcattgcaatatctgattttctttttgagcagtattttaaaataacatttattagggggtagcatttatcttcatggctgagttactatctaggttatctgaccgaaaaatgttcttaagaaggaattagagaattagggaagaaatataactagtaaacaatttccgtcttcactaaattactaaatgttttaagaaagagatttaattattttacctatcatattagcaaagatttaaaaaattataatatttaattctagcaagggtgcatgtaacaaaaatgttggcaaatgaaatttatattattggccagaaatctctctggccagatgtaagaagagatttaaaagggtgtgaattctttaatttagtaattgccttgggagctgagggttcctaaatattcctaaatacgaaaaaagctttatccccaaagatgtgagtagcagcattattcatatgaggagaatagggaatattcaaaaaatattttagagcagcgatccccaacccctaagctgtggactggtactggtccatggcctgttaggaacctgaccacacagtaggaggtgagcagtgggagagcaaacattatcgcctgagttccacctcctgtcggatcggcagcggcattaaattctcataggactgcgaaccctattgtgaactgtgcatgtgagggatctaggttgtgcgcttcctatgagaatgtaatgcctgatgatctgaggtggaacagtttcatcccgaaaccacccgtcatccccctccctttacccttccaagttcatggaaaaattgtcttccacaaaaccgatccctatgctgaaaaggttgatgaccactgttttagaggactaggtgggtgaaccatagtatatctacttggatcccctgaaaatgcttacaaagacgtctggtaacatggaaaaatccttctattattaactgaaaaaaaaaatcaagatataatgtatctttgtattttggaaaacagaaatgaatagcaaaaagactggatttgctctcaattgttattttagaattttgtgaggttttaaagtgattttattttattttttcttgttacttccctttttttttttttttttttttttttttttgcaaaggttagggagaagaggtcttgctctgttgcccatgctggtctcgaactcctgggcttaagccatcttcccacattctaaactttagcctcctaacattgtgggattacaggcttgaaccacagtatccagccgattttaattttttatttttctacatttattatctatattgtctttaatgagcccttattacttgcaaaaaggaaaacggggaaaaaataacaaattgtattaggtagtcatccaagaataatagtggtattttgattcttgtacttgagtgcccatctaaatcaggatagtcctagttttctgtgattctgtgatttcttgctaagcagaggctgggtgaagacacctgggtttcctgtgtgacagttcctggagaaggagtttgtggggaggcagtacttcaaagcgcagtcaggcaggtggcctgtggcctgtgggggtagcatttgacatgacggagagcatttcagtagactgctggaaggagcatggagatagcttaacacccctggaaactgattatcggattgtcatcctggggatgttcctgtctgtttaatgaaaatgtcagatctcctatgtgacataggagactttctccctcagctcatatgcctcctaccaaatcatcttttgttcccctaggaggaaaatctcttaataaatgcttttctcctaatggatgatgacctccatctcattcaaattcaaaataaccttttttttaacctccaaatacatgatcttatttgatcttgatgatttgatctttgaggtaggaattagctgcagtttgaggatgaggaaactgagaaaaggtcttcttatggagagggcaatgcgcttatctgtaaatggtggcgtttaaggcttcatttttttgtcgcatatcatataataccagtgaaaacaacaataatatctgctacttacagagcccattctgtgcgttcggccctgtttcaatagtttttcctaattgaggtcatttaattccctcaataattaagcttgtggaacaggccagccctgatatttgtaaagaaccttctggaaggatcttggagtccttatcctggtgatctttttggagaaaggatgggtttgtctttttcttgggaaaccaccagattgtcaaataactggaaaaagtcaagcggggagacagcgctagtaagtttgcaggcagagcacacgttagagaggtgttcactttggccacttgtcactacaccctttttgccctcgtgcaccaggacctgaacggttttccttgtaggtgcacacatctaaccaaggagggtttgttttggggtgacaggaaggggtagggatgcaggtttgagaatttttgttttactgtcttttcctgatagaatgcaaagaggaggggtcactttggggatggggggatgaggggggaatgtgggagtcctttgggggctagtgttgtggtggtggcacatacatctgcatgtgcacaccaatgcacgcgtgtgtgttttggtgggactgttaggggatgatgctggagacagaggaaggctaacatgcatatttctggagattctgcctggtcccattgctgtgtctggcacctgatgcagcatgtaacaccgggtggggcccttagccagcgtttgctctgttcacttgaactcaacccctataaagctggagggcactgacaggctccaccggcagtagcgaggccgctggagtttcctcccttttttcatagagccgctgctgcccccttctggggtttataggttgtttctgggaggaaataagtaactcggcttcatccttcacatactgtgaagcttggtgctgcgagtcccacaactctttaaatttttttaaaagttttattcacaatagcaaagtcacaactcttttttttttgtataaatttaaggggtacaagtgcggttttgttacatgaatatattgccttttggtgaagtctgggcttttgctgtaaccatcacctgagtattgtgcatcgtacgcatcaagtaatttctcatccctcacccgcctcccaccctccctcccttccatgtctccagtgacaattatttcacaccctatgtccatgtgtacccattannnnnnnnnnnnnnnnnnnnttagctcccagttataagtgagaatatgtggtatttgactttctgtgtctgagttgtttcacttaagataatagtttcatctatatttctgcaaaagacacgatttcattcatttttatagatgagtagtattccattatacatatggacaccacattttctttatcgagtcctctgttggtggacacttaggttggttccatgaccttactattgtgaatattgctgcaataaacacaagggtgcaggtatctttttgatataatgatttctttaaaaaatttttaaagttttattttaggtttgggggcacatgtgaagatataatgatttcttttcctttggagagacacccactattgggattgctgacctgaatggtagttctatttttagttctttgagaaatctctctactcctttccataaaggttgtactaatttacatgcctttcagcagtgtataagcagtcccttttccccacatccttgtcagaatctgttttttgtcctaataatagctattctgactggtatgagatgattttaatttgcatttctccaatgattagggatagtgaacatttttttcatatgcttcttggccacttgtatgtcttgttttgaaaactattcatgtcctttgctcactttttttttttttttgagacagagtctcactctgtcacccagactggagtgcagtggtgtgatctcggctcactgcaacctctgcctcctgggttcaagcaattctcctgcctcagcctcccaaatagctgggactacgggcgcacgccaccactcctggctaattttttgtattttagtagagacggggtttcaccatgttgcccaggctggtcgtgaactcctgagctcaggcaatccacccgcctcgacctcccaagtgctgagattacaggcatgagccaccacgcttggcctacactttttaatgggatgatttatggttttgttgttgttgttgagttatttgagttccttgtaaatttcaaagcgacccagtagcttgtattctgagaaaagccccatttctgaaggcaatacatatcttagaggatttacagtgggatttggctttaatagggctggaattgaaagtgggattattctgttcagatagttacagtggaaaggcaactatgttgagagtgaggagaactcgaatctctaccagccataaaccttgggctttggctttctgggcctcattttccttttttataaaactaggaggctagactggatcagttgttttctggagggggtgatggacttcagcagcggatagggtcttaaactttccccttcctcacagcctgtgcctcatttcagagcagctccactttgagcggttttatttattgggtgtcaaataagatattgcagggaaaacatgtccttaaaagtctgaaagctactggactagatgatttctgggatgctttctacccctaatggtgtaattttataaacttaatattgagtcagagacttggaagctgaaatcatagtgcctaaaatttcttggtaagagccatggatgttttgcaggcagacagtccagaagacatgcacagctggattaaggagattggcgcagctgtccaggccctcaagtgccaccccagagtaagtcacttcctttctgttgcacagtgtcaactcagagatgaattcctctcaagcaggcatgttttatttggtgatgtaggcaagcagcctggtcccgagatgcagctgaagccccaggctgtcttgcttgtttttctcattctactaatttgggtacacatttttatttttctctgtttggttgtgggaggaggtgaggtagggttagatagagaaatggaatttcttttttttttttttttttgagacggagtctcactctgtcgcccagactggagtgcagtggcacgatctcagcttactgcaacctctgcctcccaggttcaagtgattctcctgcctcagcctcccaagtagctgggattacaggcacgtgccaccacgcccagctgattttttttgtatttttagtagaaatggggtttcaccatgttggctaggctgatctcaaactcctgacctcaggtgatccacttgcctcgggctcccaaagtgctgggatttcaggcatgagccaccacgcccggccgagaaacagaatttctgatatgtcctgcaagtttcactgccaggctgacgttgacacatttggagtgaatccttttgactgtatttcatttttgtaggcaagcatccttggacttatgaggtggtgatcctggttgggtactctttctgggactctgtgataaacattgtctgaaaagccctaactttcttttgtctttttcttccttttatttttataggaaacgtccttttctagatccatttctttgacccgacctggaagctccagcctttcaagtgggcccaactctatcctgtgcagggggcggccacctttggaggaaaagaaagccctctgcaaagccccctctgtggcctcctcctggcagccctggacacctgtcccccaggctggggagaagctgcttccacctggagacacttcagaggactccttgttcacgcctcgtcctggggagggcagcgctcctggggtgctgcccagctcccggataaggcacagatcggagccccagcaccccaaggagaagccgtttatgttcaaccttgatgatgaaaacatacggacctctgatgtgtgatggagcacagtgccatgggagggagggagggagggaggacttgagagaaggaggctgtgactcagtttctctaccttgttggagggtagtcagaggcctttatgtcactcatattcctgtggatgctctttgggagggaggggcccatccagctgggctgtgtgtgtgtgtgtgtgtgtgtgtgtgtgtgtgtgtaatatcaacgcagtgtatttaatttggggaagtcactaggttagaactgtaggcatactcagtggagaggaagctacctattctattctaactattctgaggtcttcctggagagggattgttttagcagctcctctccagagggggctggaagtccagtttcaccaatgaccaagttttatttccttgtccttgttttagttttttcattttgttttcagtccaggtgcctcgcagctcttttggaatgggccagcattagtctaattttaagcgctatgtgttttgtacccttgcaaacttgctttctctttcttcttgctgttgccctttgaatgaagccttgtgtgcttgcatgatcagaccctgtaataggatgaatttccatgcacttaacatgaagagatacaaaaagaatctagagagagatatatatttttaatgaaatagaagcttggcatagaaacattgatttagatgttatgagttgctggccagagattcctcagataaaagagcctagaaaattgagttttgagcgggcatggtggctcacgcctgtaatgccagtagtttgggaggctgaggcgggtggatcacctgaggtcaggagttcgagatcagcctggccaacatggtgaaaccccgcctctactaaaaaatatgcaaaattagccgggcgtggtggtgcaggcctgtaatcccagctactcagaggctgaggcaggagattcacttgaacccaggaggtggaggttgcagtgagccaagatcgcgccattgcactccagtcagggcaacaagagtgaaactccgtctcaaaatataaaagaaaattgagtgtcccacccaaattttagggcgtacctccttccatttgataagaagatgctatttccagtgtccctgggagaattcttccatccagtttatatggtgaattgccaccagcgttccctaaaggaagagagaacttagcttatttctgtctgtgacttttatcagctagatcagttaattgtatttttaaattaaaaattagtaactagaggaagagactaagagaactatttttacctgagtaaatgctctcctcttcttgtgtccaaatctaatgcagaggtgaaaacacttgatgagaaaatcctttgtggcttgaggggaatcatgtttctttcaggacgtgttgtttccctgaagtctatgtcacactgagaactttttctgactgcactgctttggagctattcatttaaattgagtttggcctagttttcctggtataaaacaggaaatctacattgttccctctttctctcccttccatcccttcccctgcctttcctatacacgctggtgtgcttttgccctcagaaattcttggtttgggagttatgtatttttgagtgatcgaggttatgacatacttggagcggcatgatttcaagaagccattccaaattcttatagctccttagctctggttttactctcgtattttccccaagaaaattttttggctattcaaagaaagcacaaaatatgtgatgtggaactcatgaaaatagggacttttgatatctctttaaatattccctgactcacggaaaagatgtcctcttttggtgtatacattgtgaaaatctacccatttatctctctctctctcttttcttttaaataaattatctgataaggccggcaaggtggctcacgcctgtaatcccagcactttgggaggccgaggcgagcggatcacgaggtcaggagatcgagaccgcggtgaaaccccgtctctactaaaaatacgaaaaaaaaattagccgggcgcagtggcaggcgcctgtagtcccagctacttgggaggctgcggcaggagaatggtgtgaacctgggaggcggagcttgcagtgagccaagatcgcgccactgcactccagcctgggcgacagagcaagactccatctcaaaaaaaaaattatctgataggttactattgctaaattaattggccattataataagctgatttgtttcttattcagcaagatctcttttgagaatgtgacaaattaaacatacatagaatccatatggtattatcctgataaagggaaacgaggacactaagactgtcaaatggaaatcttcttgtcaattggcaaacacttgggaattccacattagagcattgcttgtttttaattttttttttttaatttttaaaagacagggtctcactctcttacccaggctagagtgcagtggtgtgatcatagttcatcataactttgaatctctgggcttaagcaatcctcccatgttagcttcccaagtagctaggactacagggttgtgctaccacgcctggctaatttttaatttttttttatctacagagcctggctatgttgcccaggctctctcaaactcctggcccaagtgatcctcctgccttggcctcctaaagtgttgggattacaggtgtgagccactgcacctagccagaacatcgttaatgtagttcaatatgagataaattattatcttcaatgaaacaagctctaaaagcattccattcctaaattgtatttcaaacttcctattttgttgatatttcttaacttctggccagttttggaccataatcttttaatgtgaaccaaagatggtacgtatttgaccaaagcagttagttttaaatgtataaaattgaaccaaatggaaaaaataggttggggatgcagtatagattagtgactaagtgcataggctctggagtaaatctgagtttttttttttttaaaggaactaaaaaatgtactgcattttctttgtggaataaaagccttgcctgagttgtgctattttcataaggcttttgaagtggtcttgacccactgtgtgtaacagtatttcaggtggtcctccccatggctgaataatgccatccattattctttaatttttatttttagaaacagtgtttcactctgtcacccaggctggagtgcagtggcctgatcatggctcactgcagcctggacctcctgggctcaagtgatcttcctgcctcacagcctcccaaagtactcagattataggtgtgagccaccacgcctggccaccatctattacttttgaaatcttcaaaagacttgcttactcaatgtcagctgatggttggtaaaaataatttggcctttagtgttaagtgagacatcataagggtattgaggtatacattatggagattgatgtcaggtcagaatattggagttatacatctatttctgagttgaatactcagctcccacgagaaagaaagtagttttaaggtccagcttcttagtctacttgaagcaaattttttttcttttatatttctgaatataaatatactcttatatgggctaaaaagaccccatgaataaatagcaggttcagtagttgaggagtggagtttagtaggtttgttttcagtataaattagataacatgtggaggtcacagcattttggaaattgagtgtccccaagtgagctttgtttataaactttcaaaatgtcggaagtggacaggtttgttaaatcttgtctgccagcacccttttcttcctttgttccttttcctctctgtgttattgcctgcggcagccagtccttcatactagatagagttcagataaagcaaacgtttggcaaaaacatactgtttgacctcctccccctctgcttatgaaggggtagcatgattctgtgttttaaagcagtgatgtttcagctgtgaaatgcactcgctgtaagctctaggctgagtgcatggaaactgttacgcttctcattttatgtgatctcctaattggtatgtagcaaaaattttctaaaactgttttgtggcttgttttgtaataaaaccatgtgaaatactgaaatatggtcatgtgttttcctaatactgaccttctgaccatgggtgggtgagctttcttatcagtctgccctcattgtcggttttagggatttcaggaggtaggttcctgctccgggtagggctagagaccttcccctcattgcctgggggagaacctggctccggggcgccgacgggggcgggtggtaggggatgtacgggtgtgtatatgcagaggtatgccaggctctgccccttaaagtttgggggccggcggaggcggcgccgtggccgggagaaagtgtctctcatttaggagggtttgcaggtccagagtaaagtcactgaagagtggaagcgaggaaggaacaggatgattagacctcagctgcggaccgcggggctgggacgatgcctcctgccggggctgctgctgctcctggtgcccgtcctctgggccggggctgaaaagctacatacccagccctcctgccccgcggtctgccagcccacgcgctgccccgcgctgcccacctgcgcgctggggaccacgccggtgttcgacctgtgccgctgttgccgcgtctgccccgcggccgagcgtgaagtctgcggcggggcgcagggccaaccgtgcgccccggggctgcagtgcctccagccgctgcgccccgggttccccagcacctgcggttgcccgacgctgggaggggccgtgtgcggcagcgacaggcgcacctaccccagcatgtgcgcgctccgggccgaaaaccgcgccgcgcgccgcctgggcaaggtcccggccgtgcctgtgcagtgggggaactgcggggatacaggtgagccgcgggggcgcgcgccctcggaacactttctaactctggaggagcgtaaaggaacaagacctcactgagaccgcacagttcgcgcctggtcctcctgcgtcatttgcctcctggattcgacacctctgtgttcctgatttcctttcctccttaacaggggctctttaccggctgctacgtggtttctccctccccatgcaccttttgaacactgtcttgcctttaacatttttccaactaggatagcaggtctggttccctcgaggcgtactcttgagccagtattttttcatagggaccagaagcgcaggcccgctcaggaggaattacaacttcatcgccgcggtggtggagaaggtggcgccatcggtggttcacgtgcagctgtggggcaggtaaaggaggaggaggaagacctccactgtcccagctaatggtttctgcgtgcctacctgctccagacccttcgcaagcgtcatttaatcctaaaaaaccagtgaggaaactgagacgtaaagaggttgaataacctgttcaaggtcatttaaccaaagagcagaggcacaaggatgctgacttctaaatcccagctccccctgcccacttaggtggctggtgctttttccccctcctgccacagacaaaatttaaggtcagatataagagctagtaggcaatttcttttctttttttgagacaaggtcttgctctgtcgccagggctgaaatgcagtgacagatcacggctcactgcagctccatctgctgggctcaagtaatcctcccaacccagcctctggagtaactgggactataggcaggtgccaccatacccagctaatatttgtatttttttgtagagacgaggtcttgttatattgctcaggctggtctcgaactcctgggcccaaacgatctgccaccttagcctcccgacgtgctgggattacgggtgtagccaccacatccagcttagtaggcattttggttgtgatcttgctcagcccccactttggatacaaggaaatccagacccagagagcagggttaatttgtcctatgttactatgttacgaggccagttggcggtggaaactaagccagaatcagagccctttgattctctcctgcctgggtccttgatactgtggtaagaggctgacttttgcctctagtattaggattgggttcagtcttttcgcagcagagaacccatgggctgctacactaaccagctctgaagaagcagtgtccctggaaaaggagagctggaccacactctcaaccatgctcacaagagatggctggggccctgtacctgccaagtccactgatacatggagaaaatttacgcatagccagggaaaagtgaaatgtctgagaaaactgaaggaaggctgggtacggtggctcatgcctgtaatcccagcactttgggaggccgaggcgggtggatcacctgaggtcaggcgttcgagagcagcctggccaacatggtgaaaccccatctccactaaaaatacaaaaattagccaggcgtggtggtgcatgcctgttatcccagctacttgggaggctgaggcaggagaattgcttgaacctgggaggtggttgcagtgagccgagattgcgccactgcactccagcttgggcaacagagcgagattctgtctcaaaaaagaaaaaagaaaagaaaagaaaactatgatggaggtatgtttaataagagtgaggttcccatgactcagattatatggctgtatcccctaactttcttgccctctgtttacactattgtcttgtggagacaggttacttcacggcagcaggcttgttcctgtgtacagtggctctgggttcatagtgtctgaggacgggctcattattaccaatgcccatgttgtcaggaaccagcagtggattgaggtggtgctccagaatggggcccgttnnnnnnnnnnnnnnnnnnnnnnnnnnnnnnnnnnnnnnnnnnnnnnnnnnnnnnnnnnnnnnnnnnnnnnnnnnnnnnnnnnnnnnnnnnnnnnnnnnnnnnnnnnnnnnnnnnnnnnnnnnnnnnnnnnnnnnnnnnnnnnnnnnnnnnnnnnnnnnnnnnnnnnnnnnnnnnnnnnnnnnnnnnnnnnntttgaaacagtctccctctgtcacccaggctggagtacagtggctcaatctcagctcactgcaacctctgcctcctgggttcaagtgattctcctgcctcagcttcctgagtacctgggattacaggtgcctgccaccacgcctggctaatttttgtacttttagtagagactgggttttaccatgttggccaggctggtctcgaactcctgacctcaagtgatccgcccgcttcggcctcccaaagtgctgggattacaggtgtgagccactgcgcttggcctctaactgtttctattaactatcaagcagtcttttttttttttttttcctccttcaacaaatgctgcttcagggaaaattatttctctacttgtcttaggatatcagaaattactgcgatggactcaaagttgctaaggaatactttgaagtccttcctacacatagtactggtagtctgcacatcacatatattgacatggtgtctgagagctttttagaagttcagagtctcagcctttacccagatagatgtgctgactcagaatctgcattaacataacatccctaggtgatttgcatgcacattacagtgtgagaagtgtcaccctgggtgatctcctttctgtttgtggcttattcactttgactgttaagctttgagctggaatggtgctgtgtaaattcctaatgtcagtttatgttcatcagtgacttcactggctgtttactaatagtaatttctacaaagtaattgttttagatcttagaaatgatcctagtcatcttaacactcaagagcttcatggtagttggactttgaggaagaagtagaaggcaatcatagaagctgtgtgagtgggtgcttctcgggtggtaagggccaaggtgatagagacagcgtcatatatgtgttagacacacactttggtcaattctgatcgtgatttgttctttaccctttctgtcctccccatccctctttgggcacgtgcaggctgaacttcctgtactgatgctgggaagatcatctgaccttcgggctggagagtttgtggtggctttgggcagcccattttctctgcagaacacagctactgcaggaattgtcagcaccaaacagcgagggggcaaagaactggggatgaaggattcagatatggactacgtccagattgatgccacaattaacgtaagtcacttaggacagaggtgcccaacccatgggctgtggaccagtacaggtccatggcctgttaggaactgggccgcacagcaggctgtgagccatgggcgagtgagaatgactgcccgagttccacctcctgtcagatcagtggcggcattagattctcataggagtgcaaaccctattgtgaactgcgcatgcaagggatctggattgcatgttccttacagaatctaactcatgcccgatgatctgaggtggagcagtttcatcccaaaccacccctccgtctgtggaaaaattgtcttccacaaagccggtccctgtgccaaaaagtttggggattgctgacttaggaggcctttcctcagatcacacaatattggcagttcagtgagaagaatatgtcagagtgaactttggggatgtccaggtttggttgaatcactgtgggaggaatggaatgccactttgttagagtctgtctcgttcgctgtgatcgctggcatccatgctattaggtggtctgttgtagaggtcacccctcctgtaagaaggtggtggtcccttggccaggcacggtggctcatgcctgtaatcccagcactttgggaggccgaagggggtggatcatgaggtcaggcattcgagaccagtctggccaacatgatgaaaccctgtctctactaaaaatacaaaaattagctgggcatggtggcgggtgcctgtaatcccagctactcagcaggctgaggcaggagaatcacttgaaccgggaggcagaggttgcagtgagtcgagattgcgccattgcattccagcctgggcaacagagtaagactccgtctcaaaaaaaaaaaaaaaaaaatgaaggtggtggtcccactgctatagttctttacctacactgactttggtattggtgatgataggggcacaattttgccggcctggggggaataggagcttggtgggctgcttttggtaaactgttttgggagctatgtgtaaaggacaagggggaatgtattcattagcttcactgatgtctttttcaaattctgcttttagtatgggaattctggtggtcctctggtgaacttggtaagtgatcactttccttgttgcttcatgtttcttcttaactttcaaagactttattaattccaggccaggggtggtggctcatgcctgtaatcccagcacatttgggatgactgcttggggccaggagtttgagactagcctgggcaagacagcaagacaccatatctacaaaaacaaaaacaaaaaaggactttacatattccatgatgcagacttgggtgccactcttgtgtagagagctgtggaatggtgcttttctgttcttggaccttaagtcaatagttagaaaaaattcaagattgttatcctggtgtgtgatctcatcccactgagaacactagggttctagctccggcttcctttgaaatttctctcttccccgtgctttctgttttcattggctagttacccaaagccctggattttatttatttatttttttatttaatagagacgatgtctcactatgttgcccaggctggtctcaaactcctgagttcaagtgatcctcctgccttggcctcccaaagtgttaggattacaggcatgagccaccatgctgtgccaaaagccctggatattaaacccaggtttatgccaaatgaccagctttgctatgaaatgtaggtccttgaagaccccttgatgctgcatatgaagaactatctctcatttaaaaatgctaattacataatgtcatctgtccaggtttttagtcttgacctcttgacctgcttatagatgagagaaaagccacaaccagcgctcctgacttcaagtgagctgcctgccttggcctctcaaatacattgccgtgtcatgtattcttaaattgtattccgtgtctctagtggaaatgtcagggtttctagttgcccaaatacatgtgaaaacctaagagagtgcaatgctgtttgacacatagcatgtgatcatcctttctgagtccctttgcactgattgcttttggttcctgtttaaatattacatttgcttttagaatgaattttatgcaaaatgattgtttttttttttttactcatagcattgcatgtcatttttctttgttttgttcctgccttctccattagacaatgagtttactagagcagggatgaaatgcagaatttcaggccatacccccgacctactgaattacaatctgtagtttaacacaatcagaaatctcttttctggctgggtacggtggctcactcctgtaatcccagcactttgggagtctgaggtgggtggatcacctgaggtcaggagttcaaaaccagcctggccaacatggtgaaaccccatctctacctaacatacaaaaaaaaaaaaaattaactgggcatggtggcatgcgcctgtaatcccagctacttgggaggctgaggcaggagaatcgcttgaacccgggaggcagaggttgcaatgagccaaggttgcaccaatgcactccagcctgggcaacacagtgagactccgtctcaaaaagaaaagaaaaaaaaaaagaaatctcttttttatcctttcccattacctaaaaggctaaaggaagatgaggtacataaagaggaaaatattttctacctcatacctttagcttagcagagctttgttccctaaggtcaattttgctaattctcagtgcagtgttactgacaatcccacagctttttaccttttccatgtttatttttacttttaaataataaaaaggcaaatgctccttgtccttctacctttgtcaaaatacaaactgtggctcacttttaaagtcaatgtaacttactaaaggaaaaaaatgagcttaaggtttttttttttttttttttttttttttttttgagacggagtctcgctaggtcgcccaggccggagtgcagtggcgcgatctcggctcactgcaagctccgcctcccgggttcacgccattctcctgcctcagcctcccgagtagctgggactacannnnnnnnnnnnnnnnnnnnnnnnnnnnnnnnnnnnnnnnnnnnnnnnnnnnnnnnnnnnnnnnnnnnnnnnnnnnnnnnnnnnnnnnnnnnnnnnnnnnnnnnnnnnnnccatgagctcaagattttaaaaagtcctcagcatccttgatcctttggccatgaaaagaaggtaacttctgcgcatgtgcagttaccctttgctgtcccatcacactatttgccctataaaggaacatccgttgctctcttttgaagtacaaagttcctctcggccctgttttctgaccctaagtaactagcttcactccttcttctgcttgttctggtcttgcactcatcagtttgcaaaacttcatgactgaatgatgtcccctcccttgccaggatggtgatgtgattggcgtcaattcattgagggtgactgatggaatctcctttgcaattccttcagatcgagttaggcagttcttggcagaataccatgagcaccagatgaaaggtaaagcaagttgggatttttttttttttggtttcgtcttgtgcttttcaggaacactcaatcttttgtggtgacagcaatttttttgtttttgtttttgagacagaattttgctcgtcatccaggttggagtgcagtggcgtgatcttggtttactgcaacctctgcctcctgggttcaagcgattctcctgcctcagccttccgagtagctgggactacaggcacccactgccacgcccagctcattttcgtattttcagtagagacggggtttcactatgttggccaggctggtcttgaactcctgacctccagtgatccgcttgcctcggcctcccaaagtgctgggattacaggcatgaaccaccatgcctggcccggagacagccatttgaatcctgtagactactgggtcactcatttgtactcagctcctataatggtgatttgagcagcaatattgggggactaggcacaaaccaagcatgagttgtacccagaagtatttggattgagctaatgtggaaatgaaacccaggggctggaggtgggaggtgggtgggaggagtgtaagtgctaatgacaaaggttctctgaagcctgtgtttcatccaggtaacctgaaaggacagctgtgatggcaaagagatcctgggacatgggtgtcttttaagctgcgctaacaggaaagaggttttgttgtaacacatcataactttcctttccaggaaaggcgttttcaaataagaaatatctgggtctgcaaatgctgtccctcactgtgccgtaagcatgtgtttgaatatgtctgggttgtttttcagaggcaaaaaccatagctgcacagtcttaacagaaaagctgagccacttggaccacagccaggtactcttgtgaccataggccctatctgtctcagggtatgtatctgcctctgcctgcatcagcactaactatacatagtttatttcattgtggctgtattttataatgtccagtggttctaggctttgggatagaggctcagcccgaactgagaggagaatgactgtgattagcttgatggaatcttccttggcccttgtgaaccttgagcagaacagagtacctactaagaatttcaggcttttaccagggctcaggagactaattcattgtttcctaatcttctcacttctcttagccttagtgaagaattgaaaatgcattatccagatttccctgatgtgagttctggggtttatgtatgtaaagtggttgaaggaacagctgctcaaaggtaagagaagtgaaggcctttgtcatctacctttgctttttctaaatgtgtgccatggtaaaatgcatgggggatccagacttgatctgtccaatacagtggccactacttacatgtagtatgtactgagcacatgaaatgtggccagtgtgactgaggaactgaattttgaattaaagtaagtttaatttaaattaaaaaacccaggccaggtgcagtggctcatgcctgtaatcccagcactttggaaggccagggtgggtggatcacctgaggtcaggagtttgagaccagcatggccaacatactgaaaccccgtctctactaaaaatacaaaaattagtgggtgcgcctgtaattgcagttacttgggaggctgaggcaggagaatcgcttgaacatgggaggcagaggttgcagtgagctgagatcacgccactgtactccagtctgggcgacagagcaagactccacctcaaaaaaaaaaatattatcattatatagtagtatattgggggggtgtgttatttcaagtggatttcaaagacataggaaacagagtgtaaaataactattttaaaaatatcacgttaaatgataatatttggatatattgtattaaataagatatattattaaattaaattcatctatttaaaaatttttaaaaatgtggctacaagaaaatttaaaattatgtatgtggcttgcattattgtctacaggacagtgctgattcagacttgggtacttataaaggcttttttttgtattttgggagggaggtggttctctatagtctaagaagagctcatgttatgagttaatagcataagtttaaattaatttggctaggaattcccaaatctaccctttcaacattaatagttattacttaataactattaagtgattaacacctattaggaattagtaactattaattattcattaatagttttttt

SEQ ID NO: 2078 - DNA, 1210 bp, Homo sapiens
cgctggggcaccgaccccgcaacgactgcccgggctgcgggaggggaggagagcagagaaccgcgcagggtgatgtgagcagagcccaggaatgccttatgtggatcggcagaaccgaatctgtgggtttctggacatcgaggagcatgagaacagcggcaagtttctgcggaggtacttcattctggacacccaggctaactgcctcctctggtatatggacaacccccaggtgagagggtcagtgggaaggggtggggcgactgggtgcccatcactgcgccagaggaatgcacacagggtgagcatagctaccccaaaacagaaaccaaaaactccattttgctttgttatcaatgccctgtctcagagatatttccttcaagccaatgatcagaaagatatgaaggactgggttgaagccctgaaccaagccagcaagatcaccgttcccaaaggtgggggcctacccatgaccactgaagttctcaagagcttagcagctcctccagccctggagaagaagccacaggtggcctacaagacggagatcattggaggggtggtggtccacacacccatcagccagaacggtggggatgggcaggaagggagtgagcccgggtcccacaccatccttcgaaggtctcagagttacatccccacgtcaggctgccgtgcttccactgggcctcccctcattaagagtggttactgcgtgaagcaagggaatgtgcggaagagctggaaacgtcgcttctttgcacttgatgactttaccatctgctacttcaagtgtgagcaggaccgagaaccactgcgcaccatatttcttaaggatgttctgaagacccatgaatgtctggtcaagtctggtgatctcttaatgagggacaacctgtttgaaataataacaagctccaggaccttctacgtacaggcagacagtccagaagacatgcacagctggattaaggagattggcgcagctgtccaggccctcaagtgccaccccagagctggggagaagctgcttccacctggagacacttcagaggactccttgttcacgcctcgtcctggggagggcagcgctcctggggtgctgcccagctcccggataaggcacagatcggagccccagcaccccaaggagaagccgtttatgttcaaccttgatgatgaaaacatacggacctctgatgtgtga

SEQ ID NO: 2079 - protein, 372 aa, Homo sapiens
MPYVDRQNRICGFLDIEEHENSGKFLRRYFILDTQANCLLWYMDNPQVRGSVGRGGATGCPSLRQRNAHRVSIATPKQKPKTPFCFVINALSQRYFLQANDQKDMKDWVEALNQASKITVPKGGGLPMTTEVLKSLAAPPALEKKPQVAYKTEIIGGVVVHTPISQNGGDGQEGSEPGSHTILRRSQSYIPTSGCRASTGPPLIKSGYCVKQGNVRKSWKRRFFALDDFTICYFKCEQDREPLRTIFLKDVLKTHECLVKSGDLLMRDNLFEIITSSRTFYVQADSPEDMHSWIKEIGAAVQALKCHPRAGEKLLPPGDTSEDSLFTPRPGEGSAPGVLPSSRIRHRSEPQHPKEKPFMFNLDDENIRTSDV

SEQ ID NO: 2080 - DNA, 2691 bp, Homo sapiens
cgctggggcaccgaccccgcaacgactgcccgggctgcgggaggggaggagagcagagaaccgcgcagggtgatgtgagcagagcccaggaatgccttatgtggatcggcagaaccgaatctgtgggtttctggacatcgaggagcatgagaacagcggcaagtttctgcggaggtacttcattctggacacccaggctaactgcctcctctggtatatggacaacccccaggtgagagggtcagtgggaaggggtggggcgactgggtgcccatcactgcgccagaggaatgcacacagggtgagcatagctaccccaaaacagaaaccaaaaactccattttgctttgttatcaatgccctgtctcagagatatttccttcaagccaatgatcagaaagatatgaaggactgggttgaagccctgaaccaagccagcaagatcaccgttcccaaaggtgggggcctacccatgaccactgaagttctcaagagcttagcagctcctccagccctggagaagaagccacaggtggcctacaagacggagatcattggaggggtggtggtccacacacccatcagccagaacggtggggatgggcaggaagggagtgagcccgggtcccacaccatccttcgaaggtctcagagttacatccccacgtcaggctgccgtgcttccactgggcctcccctcattaagagtggttactgcgtgaagcaagggaatgtgcggaagagctggaaacgtcgcttctttgcacttgatgactttaccatctgctacttcaagtgtgagcaggaccgagaaccactgcgcaccatatttcttaaggatgttctgaagacccatgaatgtctggtcaagtctggtgatctcttaatgagggacaacctgtttgaaataataacaagctccaggaccttctacgtacaggcagacagtccagaagacatgcacagctggattaaggagattggcgcagctgtccaggccctcaagtgccaccccagagaaacgtccttttctagatccatttctttgacccgacctggaagctccagcctttcaagtgggcccaactctatcctgtgcagggggcggccacctttggaggaaaagaaagccctctgcaaagccccctctgtggcctcctcctggcagccctggacacctgtcccccaggctggggagaagctgcttccacctggagacacttcagaggactccttgttcacgcctcgtcctggggagggcagcgctcctggggtgctgcccagctcccggataaggcacagatcggagccccagcaccccaaggagaagccgtttatgttcaaccttgatgatgaaaacatacggacctctgatgtgtgatggaggaggggcccatccagctgggctgtgtgtgtgtgtgtgtgtgtgtgtgtgtgtgtgtgtaatatcaacgcagtgtatttaatttggggaaccactgcacctagccagaacatcgttaatgtagttcaatatgagataaattattatcttcaatgaaacaagctctaaaagcattccattcctaaattgtatttcaaacttcctattttgttgatatttcttaacttctggccagttttggaccataatcttttaatgtgaaccaaagatggtacgtatttgaccaaagcagttagttttaaatgtataaaattgaaccaaatggaaaaaataggttggggatgcagtatagattagtgactaagtgcataggctctggagtaaatctgagtttttttttttttaaaggaactaaaaaatgtactgcattttctttgtggaataaaagccttgcctgagttgtgctattttcataaggcttttgaagtggtcttgacccactgtgtgtaacagtatttcaggtggtcctccccatggctgaataatgccatccattattctttaatttttatttttagaaacagtgtttcactctgtcacccaggctggagtgcagtggcctgatcatggctcactgcagcctggacctcctgggctcaagtgatcttcctgcctcacagcctcccaaagtactcagattataggtgtgagccaccacgcctggccaccatctattacttttgaaatcttcaaaagacttgcttactcaatgtcagctgatggttggtaaaaataatttggcctttagtgttaagtgagacatcataagggtattgaggtatacattatggagattgatgtcaggtcagaatattggagttatacatctatttctgagttgaatactcagctcccacgagaaagaaagtagttttaaggtccagcttcttagtctacttgaagcaaattttttttcttttatatttctgaatataaatatactcttatatgggctaaaaagaccccatgaataaatagcaggttcagtagttgaggagtggagtttagtaggtttgttttcagtataaattagataacatgtggaggtcacagcattttggaaattgagtgtccccaagtgagctttgtttataaactttcaaaatgtcggaagtggacaggtttgttaaatcttgtctgccagcacccttttcttcctttgttccttttcctctctgtgttattgcctgcggcagccagtccttcatactagatagagttcagataaagcaaacgtttggcaaaaa

SEQ ID NO: 2081 - protein, 427 aa, Homo sapiens
MPYVDRQNRICGFLDIEEHENSGKFLRRYFILDTQANCLLWYMDNPQVRGSVGRGGATGCPSLRQRNAHRVSIATPKQKPKTPFCFVINALSQRYFLQANDQKDMKDWVEALNQASKITVPKGGGLPMTTEVLKSLAAPPALEKKPQVAYKTEIIGGVVVHTPISQNGGDGQEGSEPGSHTILRRSQSYIPTSGCRASTGPPLIKSGYCVKQGNVRKSWKRRFFALDDFTICYFKCEQDREPLRTIFLKDVLKTHECLVKSGDLLMRDNLFEIITSSRTFYVQADSPEDMHSWIKEIGAAVQALKCHPRETSFSRSISLWGSSSLSSGPNSILCRGRPPLEEKKALCKAPSVASSWQPWTPVPQAGEKLLPPGDTSEDSLFTPRPGEGSAPGVLPSSRIRHRSEPQHPKEKPFMFNLDDENIRTSDV

SEQ ID NO: 2082 - DNA, 2839 bp, Homo sapiens
cgctggggcaccgaccccgcaacgactgcccgggctgcgggaggggaggagagcagagaaccgcgcagggtgatgtgagcagagcccaggaatgccttatgtggatcggcagaaccgaatctgtgggtttctggacatcgaggagcatgagaacagcggcaagtttctgcggaggtacttcattctggacacccaggctaactgcctcctctggtatatggacaacccccaggtgagagggtcagtgggaaggggtggggcgactgggtgcccatcactgcgccagaggaatgcacacagggtgagcatagctaccccaaaacagaaaccaaaaactccattttgctttgttatcaatgccctgtctcagagatatttccttcaagccaatgatcagaaagatatgaaggactgggttgaagccctgaaccaagccagcaagatcaccgttcccaaaggtgggggcctacccatgaccactgaagttctcaagagcttagcagctcctccagccctggagaagaagccacaggtggcctacaagacggagatcattggaggggtggtggtccacacacccatcagccagaacggtggggatgggcaggaagggagtgagcccgggtcccacaccatccttcgaaggtctcagagttacatccccacgtcaggctgccgtgcttccactgggcctcccctcattaagagtggttactgcgtgaagcaagggaatgtgcggaagagctggaaacgtcgcttctttgcacttgatgactttaccatctgctacttcaagtgtgagcaggaccgagaaccactgcgcaccatatttcttaaggatgttctgaagacccatgaatgtctggtcaagtctggtgatctcttaatgagggacaacctgtttgaaataataacaagctccaggaccttctacgtacaggcagacagtccagaagacatgcacagctggattaaggagattggcgcagctgtccaggccctcaagtgccaccccagagaaacgtccttttctagatccatttctttgacccgacctggaagctccagcctttcaagtgggcccaactctatcctgtgcagggggcggccacctttggaggaaaagaaagccctctgcaaagccccctctgtggcctcctcctggcagccctggacacctgtcccccaggctggggagaagctgcttccacctggagacacttcagaggactccttgttcacgcctcgtcctggggagggcagcgctcctggggtgctgcccagctcccggataaggcacagatcggagccccagcaccccaaggagaagccgtttatgttcaaccttgatgatgaaaacatacggacctctgatgtgtgatggaggaggggcccatccagctgggctgtgtgtgtgtgtgtgtgtgtgtgtgtgtgtgtgtgtaatatcaacgcagtgtatttaatttggggaaccactgcacctagccagaacatcgttaatgtagttcaatatgagataaattattatcttcaatgaaacaagctctaaaagcattccattcctaaattgtatttcaaacttcctattttgttgatatttcttaacttctggccagttttggaccataatcttttaatgtgaaccaaagatggtacgtatttgaccaaagcagttagttttaaatgtataaaattgaaccaaatggaaaaaataggttggggatgcagtatagattagtgactaagtgcataggctctggagtaaatctgagtttttttttttttaaaggaactaaaaaatgtactgcattttctttgtggaataaaagccttgcctgagttgtgctattttcataaggcttttgaagtggtcttgacccactgtgtgtaacagtatttcaggtggtcctccccatggctgaataatgccatccattattctttaatttttatttttagaaacagtgtttcactctgtcacccaggctggagtgcagtggcctgatcatggctcactgcagcctggacctcctgggctcaagtgatcttcctgcctcacagcctcccaaagtactcagattataggtgtgagccaccacgcctggccaccatctattacttttgaaatcttcaaaagacttgcttactcaatgtcagctgatggttggtaaaaataatttggcctttagtgttaagtgagacatcataagggtattgaggtatacattatggagattgatgtcaggtcagaatattggagttatacatctatttctgagttgaatactcagctcccacgagaaagaaagtagttttaaggtccagcttcttagtctacttgaagcaaattttttttcttttatatttctgaatataaatatactcttatatgggctaaaaagaccccatgaataaatagcaggttcagtagttgaggagtggagtttagtaggtttgttttcagtataaattagataacatgtggaggtcacagcattttggaaattgagtgtccccaagtgagctttgtttataaactttcaaaatgtcggaagtggacaggtttgttaaatcttgtctgccagcacccttttcttcctttgttccttttcctctctgtgttattgcctgcggcagccagtccttcatactagatagagttcagataaagcaaacgtttggcaaaaactgtgaaatgcactcgctgtaagctctaggctgagtgcatggaaactgttacgcttctcattttatgtgatctcctaattggtatgtagcaaaaattttctaaaactgttttgtggcttgttttgtaataaaaccatgtgaaatactg

SEQ ID NO: 2083 - protein, 427 aa, Homo sapiens; identical to SEQ ID NO: 2081

SEQ ID NO: 2084 - DNA, 107579 bp, Mus musculus
  misc_feature (1)...(107579): n = A, C, G or T/U
tttcctgtcttcctgctctagaggggacagtgtgtgaacacaagctatgagccctgctcctgatgtttgtgagagtgagagcttctaccagactcccctattgccttgcatatctttgacattgacatctagaaggacatcctgagatggcagaggatggggataggacagaagtcctccaaaggccgggcagtggtggtgcactcctttaatcccagcacttgggagacagaggcagacggacctctgagtttgaggccagcctggtctacaaagtgagttccaggacggccagggctacacagagaaaccccgtctcgaaaaaaaaaaaaaaaaacaaaaaaagtccttcgaaggaaaaatgtctccaacctctatccagagccctctttttgttctggatcccagttctagaaccataccttgtaagtggtggtggcatagctatgccacacatgggtcagaagagaacagggctgagtcagtcccaactcttggaataatgtgcagtcccacagcagggacccagtgacctgagccatttcccaccaggagcaaatgatgcctatgcctcagaattgtgggactgtgataggtagcctattttggttgaatgaggcttgctccagcgaaccagtagaaaattctacaaggggcaacgtggaggagagtgtgcggcagtccttccgtgtccacccttccagataaccagaactctggcgggactgggattttctcccactcccctctttccctcacacccactggccaacacagagccagacccccaaccaacccacatacatcagttacccattcactgtgccttccccaggaaaccagacttcctctctccaggaagttctgcctgcctctagaacattctctggcactggcctgatggaaggaagttactattgggctacacccaggcccctcattcacgggtctgtgttctctcaccaaggagtccttcagtgtaaacatagatgacaaagcatggttttccaaagcccacccccaggtcatgtgtcagaatgggatttggccaccagaggctgagaggcttttgcatacaaattgaccaagagactataccaatgtgatgctttgaggtgatttatggcacataaccactttatctttctagaatcctccaaggttatgccttaatacaatccaaatgctggccatgctgctacccctaaactcctggctacaagcaatcttactgtgtcagcctcctgagcaactaggtcaatgatgtgtttgtttgttgcttattttagacggggtgggtgggttttggggtggaggggagtgagattaaaggcaaattgcttgtttgagacaggggtgtggcaattaaaggagtgggattgaagccacatcttgtgacatctttgatccatgcagggatctaacagcaggggcctgttagaccagcactcatgagacctagacaagaggatctcaagttctaggccatcatggctgtgttacatgggaagaccctgtaaaaggttaaagggggagagggaagggaggaaaccctaccatttgggaggcagagcccaccagggcaccaggctgccctgggctacaaaacaggatcttgtttcaaataaataaacaaacagggatgtgactccagttctattggtggagtgcttagtgatccacaaagccttgcattactggatatggcagctggctcagcacttggggggtgggggaggcaagaggaccaagagttcaaggtgagctgggagtggtaaacacctctgatccctgcacccaggagacaggtggtcactgagttcaagaccagtggcctacagagttccaaaacagccagggagggctacacagagagattttgtcctaaaacaacaatatagacaatgacattgacaagttcaaggtccttctgagctacacaagtttgagactaatctggacttcaaggagaccctagtcctcatgcaccagagatcttagcacttgagaagaggagtctggagacttcaaggccatcctaaactaaagtgaatttaccctttggcaataatttatgagaaacttccctaggagaaactctgggcttgctctcttccagtatcttggacattatgtggaagcccttaggacagagtactctcaggtcttttttggttggtctcacatgtcctctttttttttttttttttttttttggtttttcgagacagggtttctctgtatagctctggcagtcctggagctcactttgtagaccaggctggcctcgaactcagaaatctgcctgcctctgcctcccaagtgctgggattaaaggcccggctcacagcacctttgagatgttgagcagccatcagtttctgacagggctaggcctgtcctttgggcctttgcagcttagatgagccttgcttcaagctttctctttctgtgtgtctctgtctctgtctctctccctctttctctccttctttctctccctctttctttcccctctcccctgtcccctctccctctctctctctggctggagagatggctggctcttggttaagagcagaatctactcttccataaggccaaaaggttaggctttgatttccagcacctaaattggaggctcacttcagactcagagcgggtggttggggtgggatattccagcaggaggcagtgtccttcagaaaccagaaatctgagtagatcccacgagctcactctctgagctaggctcaaatacctatggggggtggggggggcagggaggaggaactggagggcatgagatggtatcacagatcccaggtgggaccacacccacattcagggaggcaaagaggcacctgccttgtgcttcagtttatgttggtaatgctatgttcaaaccttactgaagctccaggtggctgtgagtaagctcacttccttccttcttcttatgcggctcctgtctaggaagaatgctttctctttcagaaactcgaaattgaaagaaatgctcttcctggtggtggagaagtcactgtagttcactgactaacacagctgtagatcagctgacacaaaatccctgggttccatgtaccgtagcacatgactatcatcccagcagttgggaggtgaaagcaggaagatcagaacttgatggtcatctttggctacatagagagtttgagtccagcctaggttacataaaaccctttttcaaaaaataaactattgccaggcagtactggggcacgcctttaatcccagcacttgggaggcagaggcaggtgaatttctgcgttcaaggccagcctggactacagagtgagttccaggacagccagggctacagagaaactctgtctcagaaaaaaaaaaaaaggaaaaataaataaataaataaattttaaatatttaaaaatttaaatcttttttaaaaactcagccagcagctttgtgtggtggcacaggcctgtgatcccataggaggctgagacagacaggaatatcaggcagcttgagctatatattaaggccctgtctacaaaatgcttggctgaaagggctcctgggcttagtctggctttgcttctgtatattctagaaactcatctcaataaaggcacagtgtggtccaccatagcttgtagatgtctgcttgattttctctagggaagcacaggggtgcgaacgacggcctgttggtgccattgcacctgatctttttccctctaaaaacaatgatttgcttccctggggaaaccaggaccaagcccacagaccctcaaaaggatgctgctttcagtaggtcagtgattctagagatacacaacacacaagctgggtcaactctaatgaatgaagatgcctgcagggatgcagggtgtggtatttagctctgtgcaaagcaactcagccatttagagactctttagtgactctgtatagctttaacctaactcccttttctctttccttcctcccttcttgcctctttcttttcttccctccttctgtcaccctccctttccttgtagcctaggctttcctggaattccatatgtagctaaagataacccttaaattcctaatcctccagccaggcgtggttgtgcacgcccttaatcccagcactctggaggcagaggcaggcagatttctgagttcgaggccagcctggtctacaaagtgagttccagcttgggctatacagagaaaccctgtctcggaaaaaaaaaaaaaaacaaaaataaaaacttaatccttacgtgacatgctgctgtgacagtggtgggtcagtacacacagttctcccttcgtttcctcttttttttttcctttaaaaataaagatatatttaatttttattaacgtgtctatctgtgcacatgtgccttgcaggtgaccttagaggacagaagggggcgttggatcccttggagctgcacacagaggcgactgtgagctgccataagtgggtatttgggtcacactcaagagcagcaagtgccactaagccgtctttccagagcccacttcccttttctcttcccctccccttcctctgcaagccaggctatcctcagactcacagtgatcctcttctgaagtgctgcgattattaccgcacctgttttttgtgttgtttctcaaaagagggtctgtagctcagactagccttcaatttacgatccttccttcagcagtctcctttatgccgggacagacctgggccctcgaccctggaggctataacctttttgctatctgtctgtggcattactcagcggtcactctcagtgctggtggaacgcttcctctgtgcgaggggacttctcaggagagcagccacaggtctctggctggcagaggccccgccttcctaacgcctgtggggctgcctgggccagctcccacttccctatatgggcgtgaatgtcactcagcctgttcgtcaagttgattccccagacccaggaagggccacgccttggtgaagagatgcaatcagcttccaccagggaaaggaaactcatccttcagtcacatggctcttgcttcagtttttattataaaactaggctgcccttggctctgaggttcaggaatttcactagagtatctacctggagtctctcttcaaagagagttcacttcagacaaagaaaagggttaggattattattttttccttagcccaggctgttcttgaactatgaagatgaggatgaccttagatttctgagtgtcttgcctctatttcctaaattctgagctgacaggtgtgcaccatcacacctagtttatgtggggccgggaatgcacactgtgcacactgggcaatcactatcaactgaattgcattccctgtctaggtctcaaaagttttgattatttatttggattattttaccagtacagtagtagtttagttgtgtgtgtgtgtgtggggggggcatatattgagctggacactagctaatgcactgcttatcaatttttaaaaaagatttattattatatgtaagtacactgtagctggcttcagatgcaccagaagagggtcagaactcattacggatggttgtgagctaccatgtggttgctggaatttgaactcaggactttcagaagagcagtcagtgctcttaatcactgaaccatttctctaggtcccagcaccaatttttgattgctaatgtgagcatgctctccatgagaccatagtgctttctcacctttgagcatgttgctggattggagatttaaagttttttatgtgtataaatgtatgtaagcacaccacatgcaccagatctcctggaactggagttatagagggttgtgagtcaccatgtgagcgctgggaatgaaatctggttctctgcaagagcaatacgtgttataattgtttttggatttgagatgtaaataatacaagtgtcagttaagatgtaatactacagttgagcagttgatgtagaccaataacagtagctgagtgtacctgcctttctttcttccttccttctctttctttccttctttctttctttctttctttctttctttctttctttcttctcttctctaccttcctttttttttttttttttcttttttcgagacagggtttctctttgtagcactggctctcctgaaactcactctataggccaggctggcatcgaactcagaaatctgcctgcctttgcctcctaaatgctgggattaaaggcgtgcgccaccaaggcccagcactgcctttctcttctgcatacaatgggaaattacatactatgctgacctataatcccatcaataattgttgattcaacaataaattatgctagatgtaatggaatacacctaccaagaggactatgtgtgctaggtcatcctgaactacatagtaagctctaagccaacctgggctacacagtaaaaacccttctcaagaaaaacaagaaaagttatgtgtaaagtaccaagggatcacttaaataggttgattcttgtgctagcaaaatatcccagttagtgacaggaattaaactagcttttgttccctactgtgggccagtgcaaggcactttagttcacatctctagtgtaagcctttgggcaaatttctggtttttctatgcaacccaggatggcctagaacttgagatgctcctgcctcagcctcccttgtgggttctgatgtcttccgccatgagggtgattattggccttcttaagaagtggcaggtatgggtttgtttccagttctgccagccctttggttcaacatgaagagaatgtggtagctcctgagcagaggggccaagcgtgcagggaacatcttcgtgtttaccatggctcccttccttagtcagtgacgctgtgtttgttggcctcatcatttgggaccagtttaagatcagttaagaagtcatagtccctccaatccctgttactatctgcacttacttttcttccaaaacttcagctttcttgtaagcataagtccattcttctcatacaagcttcaaggttcacatggaatccttgagttctttctagtctcatcctttattttatttgatgactttctccttaatattagtatagcagtttctttgtattgcttcaattctgcctggtgtaataaataggcctgtttctctgtattgcattcttcttggctcctaagatccctccagtaacaacttccctttggtgacctgtgtgcctggccatgcgtgttgtcttcagtaacagcaaccacagcttaccatttgcaccctcagagctgaaggtctttctcatctgtgccttttcatgactttgactcactaggttatttggttacctatttagacaaacctgggtcctttgggggcagggttataaaccaggcaaggactttggaatgaattaagggtcaagcatggtagtgcactcctgccattttggcataggaaagatggcgtcagaaagaggattttgataccagtctgggcaacaagagactctgctgaagaaaataagagggggctccagatgaagttccactaataagctacaagattagcacaagcattgcagaaactgggtgtgatggcacatacctgtcatacttgggatgtctatgcctgaggatcaggagttcaaggccttacttgtaactggaggacatttaaggccacctgggctacatgagatcctgcttaaaaagggacagaactggaaggatggctcagaggttaagagcacttggctgcttttctagtccaggttcgattcctagaccctacatagcagttcataattgtctgtgactccagttccagggaatctgatgccttcttctggcatacagtggggacaccgtacttggttcagacaagcaaagcaaccgtcacataatataaatacttttaaaatgggggaagatagttgaagctctttttgctttaacttttgccaaatgatgtgttaaatttgggatgacagattagattttatctggaagtggttgggaagcagaaagggttttggaaagttcctatctagcagagaaattatggagatggagaaaccaagagttaatcagggaatagtagaattcaaggtcatcctcagctacatagtagtaagtctgaagctagtctgggtgggatacaggagatatcaaaacacatcctgcaggcttggtgggacatgccttcagttccagtacttgaaaggcaaaggaagggtaaatcttttaagtttgagagtaacctgctttacatagatgtctagtaccctgtctcaaaaacaaaacaatgggctcaaaatgtaaaggttcttgccacaaagcctgagaccctgagtttgatctctgggacccacatagaaaaggaggcctagggctggagagatggctcagcagttaagagcaccaactgctcttctgaaggtcctgagttcaaatcccagcaaccacatggtggctcacaatcatcggtaatgagatctgatgcccttttcctgtatgtctgaagacagctacagtgtacttagattataataataaataaatcttttttgtttttgttttttcgagacagggtttctctgtatagccctggctgttctggaactcactttgtagaccaggctagcctggaactcagaaatcctcctgtctctgcctccggagtgctgggattaaaagcgtgtgccaccatgcccggcataaatctttttttttttttttttttggtttttttcgagacagggtttctctgtattgccctggctgtcctggaactcactttgtagaccaggctggcctcgaactcggaactcaagagatccacctgcctctgcctcccgagtgctgggattaaaggcatgcgccaccacgcccagctggcataaatcttaaaaaaaaaaaaaaaaaagaaagaaagaaagaaaaggaggcctaacgccttcaagctatcctctgacttaaacatgcttgtcatggcatgcacatcaaacccaataaatacaataaatgctaaataataaaggacctctccctcccccaaaccaaacaaaataaagccgaaagagctcagaaggcagagagaggcgggcaaatagctgtgagagttctaagtttcaggccatccagagatacataatgagaaggaggagttgttgttggaggtaaatggctacaacttgagtaaagggtgaggggaaatctagggctgctccagctccagatctctcctctaggtgtgaaagcaagtgatctagatctaaagggttgaggtggggcttccattcagagagttgcacgcatcccagtagcattcaggagatttagggatgctgaatcccgccacaattctcagaaaagtaggtgaagatcgagatcgccgaaggcgtcctcagaaccggaccagcgatgcgaacctgaaggttctcctccgaacgggccggggacgcatccccagacgctcttcagaaggtggcggcggtcagggccacggacaggaccaggcctccactagaagaacctaggagccccagcgcccatgggaaccaagccaagtcaccagtcacttgaggactactcagaggcgcctgtccaggcccgacagcctccggcgcattgtgggtggggcgcccctgctgagcacagcggggaaccctcagctcagccagttgttggccgcccggtagcccagtcgaaccgccctccaaggtcccagcaagcgggccacgaattgacgtgtcctccaagaccgcacccctcacggcattcccgccccaaacctaaatccctccccgatggcgagttgactggctctggaacccgctccattctcccattggatgctcgtctgtcagtcatcctgtcccgccccctaggcccgtcccagccaccggagcgatccggagggccagccggccaacgcgctcattggctgctgataactgtctgtcctgaggctggccacacccctcgtggggtgccgatcttgagtgccccggccagacttcattggcctgcggcgccgccactcggagagacgtgcatcaacccggaagtgtgagaggcaaaatctgcctagcaaccggggaagccgggctgtgaagcgggcaatttcagtgagagaaggagcggtgagaccgagcggcggctctgagcgcgccgcggcagctccttccgcccggggtcagcgccccggcgcgcgcacgcgcaccctcgctgcctgagcgcgccccgcgccgcccgagggagccgtcgccgtgggacgcgaccagaccggacccgagcgctctgcctgaggttggcctggggcccagctgccgatcgcgcggagccgagcaacttcggtgagtgcggggcaggcgccgctgctggggtccccagcttccggtgccccgggctcccccggcttccgcttggccgggctagtgcgtttccctactggactctttagggaacctgcgtctgaaggccccctgtctctgagagcaccccttctgtgtcgaggagcccctcgggtctgagagtgcccttttctggggtactccttgtttgagagcaccctctttttagaggaattagtgtctgaaggtgccctttctttatagcacctcacctctctgagggtgctccttctctcgcgaacccctgcatttccgcgagtaccttagaaagggggatcttgtgtttctgagagtggcccctttccgagggggcactgctttttctgactcaactttgctgaggaatctaacctgagggacccttgtttatctgcatcctccctctgctcccccctgtgaactcctatttgagggcgaacctctttttgagagagctttcaactctctcaggggagtctctctggtacatcttccgtattgagaggaaccctatttcagaccttctacgttcccgaggggatcccctatttctgagacccttaccccgagatgtaccctgcctctttgagggtctgtagtcattctctggagctacccctcctttccagggtgtttggctgcacccccttgcttctgtaataggtagctttttgtctgatgagtggccccccttcctttctgggatttcttgcctccctcaggaaggttccacttcccttaggagacactatctttctgaggacctcttctatggaggatgtttctgagatcaccctgcctctcggggaacctcctcccacaattttctggggaggttgtttctcctgtttttcctttttttttttttttttttttttttttgacagatcctctctctgaaattctctccttggttttctgtccttattttgagtgacttctttctttttccaagttttcccaaatctgatgtgctccttggagggtttccccacttttctaaactgttcctaacttgcaaaccttacattctctctctttttttttggaggggggaagtgggagggtgtcatactgtgtaactctcccctggtggccttgaactcagagatctgcttgcagaggcccttgtgagctagaattaaaggcctgtgtcatgcctggtctctccacattttaattgttttgagactcagtttttgttacattatataccttaggctgtccttggattaagatttttctagcaagattttccttgaatttttttctgagacagggtttctctgtgagttctggctgtcctcactctgtacgtgttggtctggaactcagagatccgcctgcctctgcctttccagtgctggcatcaaaggcatacatccttctttcttttaaaaggcaggatctcacggggggggggggggcagttctggaactcactctgcacccaggatagctacaaattcatggtcatcttcctgcctcagactgaagactgacagcagcattataggagtgagccactatgcctgtcctttgtccccactttagctaggtaacccttttccttagaagaggcactgtggatccctcattttcctgagggatcctgcagcataggtgctccctacctacttgcctgggatttttctcttcttgagagttctctccttcatttctgtgtgagagacttatcatttagcttcggagccactaatttcaagattcctctatttctgtatggtatccaaatctctgctgtgaagggaaagacttagacatgttttctttcctttagttttctttcatgacagttttggggtttctcagttatcattgtgttttaatttttagacatggtctttcactctgtagcccaggctgctctcaaagtgctcatgtatgtagctaggctgtctttgaatcatcttgtttaacctttcagagtgttggattttttttttcatgacttttatcttagtttttagaggacttttggggctagagagaaagttaggagacctatatgcaaaaacaaaaacaaagcattccccctaatgtcttgggatttgagtgtgttactgtattttctttccttttttttccctttttaattttttggagacaagatctctgttatgtagccctagacagaggtcttcctgatttgcctgcctctgactcttcaagcactgagattaaagtcatgggctacctaccatacccaacttcctttcttttttgatatagggtcttgtcatgtagcttactctgacctcagacttttgatagtttccctgccttagcctcttgagtgttggcattgtagatgggcaatatcccctactgtattacattttcctgacatttgaggccagtgttagaagactgtaggcactgagagacaaggcagaaacattgtctccctattatcacaaggtcaaacctatggggtgaatccacttcctgccctgtccatctgcagacagaggaccttcctttcctgaagaaaagagaagaaagcactcctttgctctatcagggtttcctgcaccaccctgagcctctgatttaccccttgatcaaaagaggagccccaggttgtaaccttggtttgaaaggacaaaagcaggaaatgggtcatcctaggtctggaaaaggtgctatgggggcaagagacagagaactacatgtctgtaagttttaggtgactttgacctggcccaaaggaagggtttccatggtgtttacaaatctcttatgtatttttttagtggcccaccctggattccaagtcactgcagtagctaattttatctgctttgccaaggcagagctctcagaagcctaaggaaatgaatgctggcattgagagatggtccacaggacagaaatgaactcagtttgaaatctgagtaagtcctaaccgcttcgagtccacaggctggtttcaggctgggaaccaagcgagctgaacaccaaagtgggtgagccgtttggtttagcatttcaacaagttgtgtccctctgttcagctccacctttacttttccttctagtttgacttaacacagtctctccctggtccttttccatccgggtcttgcttaatttgagtcttttgtgaagactcctgctgaggctataatttgagttctaaatctgtcagtggaccatgtggacacaagtttcaactcgagctattttctcctgtggagaagcagttggagagtttcctggttcctcagctcttggggtagtcaagtccaggcaagaggctgctgcagacctgttgcttttccattgcttattggtcatctgtagatactgctcttagtgaagaggacagatggtgaggagcttggggcttaggctgtcctgggacgagatatacatgtatatatttatcacttgaaagaaaaccaacccagcttatatagtgttaaaaaaaagatgtaaatgcttaaagtgagagtttttgtttttgtttttgtttttgtttttcaagacagggttttctctgtatagccctggctgtcctggaactcactctgtagaccaggctggcatctgcctcccaagtgctgggattaaaggcgagtgtaaccatagcccagcggagagttgtttcttgtttgttactgtaacaaaatggttgagtcaggctactttataaagagctttattgactgctgagatggcacagggtgttaatggcaagagacaaggaacagggtattggtgtaactatctatgcacacctgtactctttttatttattcttatgtatgtatgtatgtatgtatgtatgtatgtatgtatctatctgtctgtctatctatctatctatgaatcatctatgaatgatagggtttttctgttctagaactcactctgtagaccagacttgccttgaacccagagatctatttgcctctgctgggattaaaggcatgccaccatgcccaggtttttcttttttaatgtttatatatgtgtgtcttgtgtgtatataaattggaggacatcagaaaacagaattggatcctctggaactgtgggttctgggaaatgaacctgggttctacataagagcaggaagtgttcctaactgctgagccatctctctagcccttctctctctcttgttttaatgtattccattttttaaaggtttatttattgtatatatgtgagtacactgtctctctctttagacggactagaagagggcattggatcccgttacagatggttgtgagccaccatgtggttgctgggaattgaactgagaacctctggaagagcagagccatctctctagccctcttaaaaggtttccaccaagggggcttcaccctaaggattaattctcattaattctaaatctaaccccccatatttgtcattgtactcagactcatacatgataacaagtgctttttaccactgaattgcactgagctatagcctcagtctttaaacattttttaaagcattttaacatttttattttatgagtagggtattttgcctgcatgtgtgcatcacattgatatatactcaaaagagggtgttgaatttctagaactggagttggaggtggtcgtgagctactatgtggtgctggaagctgaacgtggctcctctggaagagcagctagtattctaaaatactgagtcatctatccatccccacccccaatttttttattgtagttgtgagatagactctagatatgttgttcagtctgaccttgacctcactccagctcaggaaggccttgatcttgaaatccttctgcttcagactcctgagcagcaatattacaggctcatacctatggctcatttctaaaccgcatatagcctggctaaattccatcctcattttttgggaagggtgtgtgtggttgagacaaggtttcatgtagcctctggagtcatgcttgctctgtaccaagactggcctcaaactgttgatctcttgcttcccatcttctcagtgtcgggatgaaagactaatgccaccacacttggctttctaaccaaataacagtacaattgtgatctctgtttgggggtgtgtgtggttaaaccataccctcatcatagcagggcaatacctcctttctggaggtttcccttttgatgctttaaggggcatgtttgtccgagttgtgtggtttaccaagttatagcaaaccagcatggtactaaagattggaacacactgctaccaggagggattcattataacttgagggaaggagtgaacctgaggtaatagactagatagtcagcacaggttggttatggtgcttatgaggttagggccctggcctggactcccagacgaaaagatagtctgccaaagctaaatctcctcagagagaaacaaatattagaagtctttcagtttttctgtgttctgttaccagatgtgagaaagatttgctatgtggcaggcacttgtgtttgctttggccttggcatctccctctgtcaaatggggtaatttgtgagtgaagggcaagtagagagatgcataactaattagaccggaggcaaaatagaagataatgaacttgaagaattgtgggaagccaaaaagtaggtgagctgtaatcttaaaggatcctgtcctgttttgaaatagcatgggatgtggatacttgttgagttatagaatcttgaaaaatgaacctctttttcatggtattggtcagatttgggaacaaaagatggaaaagtattgtacgaaggcatttaactactcataataatagtactttgagaagaccagttttgtggcttagtgcccacaaggagactggaaacgctgggatccagctctagagacttgaggtgctaaccccacttctagggctgagaggaaagtagggtaagatgggttgggaatgagggggcagggcagttgcatacctgtcttagctttttgggataggtactcactatgtagcccagactggcattagagtcatgatcctctaacttaggaaccttgtgtctcctgagggctgagcttacaggcatgtgtctccatgcccacataggatactctttttttttttttttttttttttttttagtggatttttttcttagtaattagtgaaagccctataatcatggtgggtgaatagtgtggcaacagatgggtaaaacccagggggaaaataatgaatgaaaaatctgaaccaggccctcccatgttggaaaaaagtcagagtcttttatattttatagcccaggctgactttaaactccacacctagcccagaatgcccttcatcactgatccttttgtgtctacttccttaatgctggaattacagaattataacagcatgtttagtgactttggccttttttttatgggagggggaggcagtatctcataaaattaggattgtctgccattttatctatgtgaacagaacattaatctgtagacctaaccagtcttgactacctctgcctcctaagtgctgggattaaagtcatacctggcttgacttggctttttttttttttttttttttttttttttttttttgaaacagggtttctctgtacagtcctggctgtcctggaactcactctgtaaaccaggctggcctcgaactcaaaaatccgcctgcctctgcctcccgagtgctgggattaaaggcgtgcgccaccacgcccggctttgactttgcttttaagccctccccttcctcagggtgtttctttgttagccctggctgtccaggaacttattctgaagaccaggctgacctcaaattcagagatctgcctgcttctgcctcttgagtcttttaacattttaagaaatgtctactaatctttttttaaattattattattttttatttttatttccagacagggtttctctgtgtagccctggctgtcctggaactcactctttaaaccaggttggcctcaaactcagaaatccgcctgcctctgcctcccaagtgctgggattaaaggcgtgcaccaccactgcccagcaatttttacttattttagatggactttctcactggtcacactagggtagtcttggttggccagggagccccagggatgtgcctgtgtctgcctccccagtgctgggattagactggcgttttaaacctaggttttagggctagaagacagggccttactgcatcatccaggttggactcaaacacgtggtaattctgccttagacttcttaatgctggaactatagacatgagccgttatacaaggtagtttatttttatttatttaattaaaaatttacttatttgggtgtgtgtgtgtaaaataatcaacctggggaattcactcttctcttgaaattgcactgtctcttgagccacaaatgttgctggtaggtggtggcctctcctgtatctgtttatctgacaggaaaattttcaatttttttttttccattttaaggatctttacagcaatgaaaagccttgggtagttggaaacagtattgatctaggtacttttcctttttttttttttttttttaaagatttatttattttatgtatgtgagtacaccgttgctgtcttcagacacaccagaagagggtattggatcccattacagatggttgtgtgctatcatgtggttgctgggaattgaactcaggacctctggaagagcagtcaatgctcttaatcactgagctatctctccagccagatctaggtacttttattcagcataatgtaatgtggttatcagtaggtgggcaatgctgaaatgcatgtgggtccaaacattactcctgtcctgctccagccaaggaaatgttgatttatataactgaaatagccagggaagtcagggtttccttcctgctgcagacagcactgggggcatttgttccctgtgggatgttgagggtaagaaataaggaacctctttgggaactgggaaatgactactgtatggggtggaaacctaactaatgaggtgttctttgtaatgtccagtgtcttggcctgctcctgcttgcaaccccaccctttgtgtgtagtgctatatcactgagtgtggatagattcttgtaaactggcctataaagggtacatgagtacttaaggaagacttctagccatgcacatggtgaacacaaatcattctagcacttgggaactgaggcagggggattgtaagttcagccttagcaatataatgagacttattactctctgttcccctaccaaaaaaaaaaaaaaaaaagagttgcaatggcaggtttttctgtgttgccatcagtaaggtgggtttattttatttaaattatacacatttagtattgtgggatggcatgtagacagaggataacttttccagtgactcttctccttccaccatgtgggtcccaaagattaacctcagattgtaaagtgaataaatgtttttattcattgaggttctaaggatgagatcgtaggctctcagtctcactaggcaagtattgttactattgaactacatctccagcaccatttaaaatattactttaaattttatttatttgggctggtgagcccaaatggctcagcggttgggagcactgatttttcttccaaaggtccagagttcaaatcctagcaaccacatggtgtctcacaaccatccgtaatgagatctggcgccctcttctggtgtgtctgggggcaactacagtgtacttacatatagtaagtgaatgaatcttttagaaaattatatttatttattgtttgattggtgattggttgaataatagcgcctggtactcacagagatctgcttgcctctgcttctgaagtggtacatgccactgggtatggtaccacacaccattaatcctagaatttggtaggcagaggcaggcagaaccttgagtttaaggccaacctggtttatgaagtgagttcctagacagccacagctgcatagagaccctgcttcaatattaattatttaaaagaaaatttatgtgtatgggttgcattaggattctctagagtaacaaaacttatagaatgaatctcccccctaccctatatatatattctatatatctggctgtagtccagattgtccaacaatagttagctgtgagtgaaaagtgtaagaatccagtagttgctctgtctacaagactgggtatctcagctggtcttcagtatgtgctggagtcttgaagtaggctccagtgccagtgaaggaatggatgtgcaagcaaggcaaggacaagcaggcaaagagcagaagcttccttcttccattgtcctaatataagtttccagcagaaaaaaatcgggatcaaaggcatggcatgaactttctctgaaagatccagattagaaatggattcacccacttcaaaccatgaaaaaaaaatctctcacagataagctcttcatttctgtattgtagactacttgacaaccaagaataaccatcatatgttttttggcttatatatgtctctgtaccactgtgtgttcctggtgcccaagaaggcagaagagggtttaggatccactagaagtagagttacagatggttgtgagctgctgggaattgaatccaggtgttctgtaagagtagtcaatgctctcaatcattgtgccatcaaactccagcctcaggaatgaatgcctttcaaaaaaaaaaagttttttttttttttttttttttgcatttgtcattaatttacttattctgtatgtgtgtgggtgtttagtgtgtgtagaggtcagaagctgaatatcgctggacagtggtggtgcacgacttttatcctagcactcgggaggcagaggcaggtggatttctgagttcgaggccagcctggtctacagagtgagttccaggacaaccagggctacacagagaaaccctgtcttgaaaaaacaaacaaacaaacaaacaaacaaacaaacaaacaaacaaaaaaagaagctgagtatcagcagtttgcccttttctgctacgtgggctcaggggattgagctcaacccattaggcttgggcagcaagacccactgagccatcctgccaccccctcctacctttgaaaaataatttagggctggtggtgtaactcaattgatagagcactgcagagcatgcacagaaccctagatttagtactcagcacagtataaactcagtgtaactgatgcaggaggatcaggagttattggttacatagaaagtttgatgtttgaatgagatacaagagcctgggagaccttgtctcaaacaaatacttagtttgagtttagaaattgtaagtgtaagtgtgacttttattgcttgatgtaactttccatgccagcaaaaatctcaacagtgcttgctagcctgaagtaagctctggttctcaccagtccggaagtgagtagaatggtggctttcactgagctgccagcccagctgcagacaaggagacaagcttctacaccatgggacttcctggaggatactccttgatgctgcagccagtctcattgggagtctgggtgtctatttctgggaagtttcaaagtgaaacctcactgcttctctaacttcctcacctacaggaggctctgtggcatttgtgaggtttatgatggctgttggcagtagttgatttgtggcaagtggctgagaaaccagagattctggggtatcagtcagtgagagcagaatgctcatctttgagtctgtggaaatcactatgctgggtatttctgagtcctatggtatcccttcaggacattacagaagttaacagctagcaaagcccttttcacactgaagctttttttttttttttttttttttggtgtgtgagtgtggaacccagagacctgctcatgttaggcaaaccccaagatatatagctactttactactttcacctcctcacttgctttaactttcggagacagggtcctcctgtgttacccggactgcctgggacttaatctttctgtctttgccccctttttgatacagggtacaacatcttcctttgttgcccaagttagtcttcaaaccctgggctcaactgatctcccactgtagctgggactgtaggactacctgggttttgttttgtttttgttttttgtcttttgttttttgtttttttttttctttttcttttcttttttttttttttttttttttgagacagggtttctctgtatagccctggctgtcctggaactcactctgtagaccaggctggcctcaaactcaaaaatccgcctgcctctgcctcccaagtgccgggattaaaggcatgtgccaccaccgtccaacttatttctgttttttgtttgtttgttttttgcttttctcttctgaggattttgctatttacccttagccagtttggagttcagggatccttgagtgctgctgcgattaccaccatccttggttggccttaaactctcacagtctttctgtctcacatctagagttctgagattatagtgggcactaacctatcagtttgaagaaaaaaaaattcagggctagagagagggcctgatgcttaagattgcttgctgatctttcaaaggattcaagctcagttcctagcactcaggttgttcacagccacttttaagtacagatccaacacccacttttggcctcctccagtatctatagacatgtgtttggtagtgtacacattaattctggtatttgggaggcaggggtagattgatctcttagtttgaaggcagcctgttctacgtagtgagaccctgtctaaatcccccaaaagaatttttaaaatattaaaaaatttagacaagaaagatattaggcatcatcatcatcaaccatcatcatcatcatcatctgacacagtatttctgacccaggctcactatggagtcctgggggactttaaacttctgctccttttgcctctacttttgcagtgctgagatgacaggcatgcactacctcaccaagtttatgtggtccaggggatagaacacaaggttttgtgcatgctagttgaaggctctaccacctgagccctttggctgttgctgattacctggggaaggtgagggttccagcaactgactgccttgttgtagattgtaaagttaggagtgcacaaggttccctttgccctggtgttactctgttctatccaactaagaaggtgccattttgacattgttgtactggggtgaggctggaaatctcaggcttgatgttaatctacccaggtcaatgattggacagatgttttccttaagtatgggctgtgtgtcagggctggagtcagagagcagctgggttctcatttagagaacagaagtggggtttgtgagtgggagtaggaagaggggtgtaaaagagagttcctgatagtcctttttccttttgctcttttttcattccacccaaacagtgatttgggagatggagagaaaagcccagactggaagtggctattatagacaagtcctatcactgtgcttgtgactagctctcacctctgggctcctgttgcccttgaggagtggatactggcttcttttttatcattttctgttcactctgagaactctgttcagacttagttcttgcgcccccaatttgagcacaggaaaactgttcatgttctgtttttattttttaagtcataggcttcttcttcttcttcttcttcttcttcttcttcttcttcttcttcttcttttttttttttttttggtttttctgtatagccctggctgtcctggaactcactttgtagaccaggctggcctctaactcagaaatccgcctgcctctgcctctcccgagtgctgggattaaaggtgtgtgccaccacgcccagctaagtcataggcttctttgtaagagggcctgtacccacaaactcagagaccccatggggcagggtggccggtgtcctggtgtcctgttgcgctgtctccaggttaccatttgaggggctgccagggaggtgtggggagaagcaaatataggcagggtttggcagttgtggagttggtttcttacttctgcatttatattctgggatggaactcaggtccttctgctttacttgtggagcagctgtgtctttttactgaatgaatggactattgggagccatggcttcagcacaaatcttgagcacccctcccttgctgacttgagcttaaatgtggacggtgccttctgttaccttgtaaaattaagtacttcagaaaagctacctaattacaaatggtctagtctttggtactgtgccctcaactgaagtgtgggtatggggttcacagaaggagctccactgaagcagctgttttgaagctgtaatacagctgacaatctacttgaggctggccaggattaaagctgcccaggaacacagtccactgttgggtgacaaaacttttccgggggaatgcaacacacacagtctactcacctccaattgggaatattcaacacaccaagtatggataaaactgaagcccaacatggtgaaccactgagctttattggggttagttatagtatcagaaatgactcaaagagcttcatttcacatggttggggacctgaagcacagtgaatactttcaggcagctcaacaggttggagagtgacctttccaggtgcctgcctcagttggtttaaaactttttccatgcagagtttatggtttctgcttcttccaggcaagctggtctggtcttgggtccagcttagttctgattatgagggttctttacagagaaatttggtcagtttcagggacttcctgaagctattttgtgttgtttaccttcctgcttaaggagcttacctgtaggatagactgtttaaatctcagagggagaggggggaagaagggcaggaaaggaatggggggaggagaggggagggaactgttacacagcaactatgctgggcagcaggctgaatatttgccatatggacttgcagtctcttgaagcataatgggatgaatggggaagaagcttgtagcatgtggctgcatgtgcccttgcagagacctggcttcaagagatcaatggtttgactagctgagggtcagggatggggctggatctggaggacagagaatgctgcagcaaggaggggaaggtgaggaagatctgtgtactctggggctggtattctaagggagaatgtctgcccagcagggacacagtgtggtctttgacttcctttgaagtcagtaatggaactcagtattctggtatagaaaagcccaaagtagatggtggtagtgcacacctttaatgccagcactcaggaggcagaggcaggtaggtagatctctgggttccaggccagtgcttggtcttaagaatgagttctaggacagccagggctatactgagaaatcctgtctcaaaagacaaacaaacaggaggaggaggaagaagaagaggaggaggaagaaagaaaaaaaaaaaaaagaaaagctcatggttgctttcaaaggcagaaagtctgatgaaatgtgtctaagtgtggtgctggcaagatggctcagtgggtaagagccctgactgctcttctgaaggtgccgagttcaaattccagcaaccacccgtaatgagatctgatgtcctcttctggtgtgtcagaagacagctacagtgtacttatgtataataataaataaatcttttaaaaaaatgtgtctaagtgtgatccaagattgagtgcaagaaagtcatgtatggtggcctgcacctgcaagactagcacctaggaagctgggcggtggtgcctcccagcacttgggagtcagagttcgaggccagcctggtctacaaagtgagttccaggacagccagggctatacagagaaaccctgtttcggggaaaacaaaaaacaaaacaaaacaaacaaacaaacaaaacaaaaaaagaataatttttgcttttctggaggatccaggtctggtttccagcacttgcatggaggctcactaccatctgtaactccagttccaggggatcccatactgtcttagtcagggttactattgctgtggagaaacaccatgaccaaagcaacttggggaaggaagggtttatttagcttacacttctgtatcactgttatcattaatggcaggacaggaactcaaaaagggcaggaacctggaggcaggagctgattcagaggccatggtgggtgctgcttactggcttgctccatatagactactcagcctgctttcttatagagcccaggaccatcagaccagggatagcactactcaaaaagggctgggtgctccctcatcaatcagtaattgagaaaatgccctagagacttgcctaagcatggaaactttttctcagtttgatttgtcttcactcagatgaacgtagtaagtgttgagttgacatgaaactaggcagcacatactcttttttggcttttacacatgtgacacatgccggcaaatatatatagaagtcctagggttataggtgtgagttactataaccagctggtctcagactctgagttcattatttatctggggtgctggggttgaaccccctgagttttatctcctcctgagtttaaatgatcttcttccctctccaacagctgggtctacagacatgtactgtcatgttctgttcccagccctgtttttattgtcttggtcctggggatagaacctagttctttacccattgccagcatgagttctaccatattaatgaacaataccactggcctggcccttccactagtggttttacttttatttttgtaaatataatatatttccccccccccccccacacacacacagttagttgcaggagtcaaatttctcctccttccatgtagagtcccagggattgaactcaagattgtcaggcttggcagcaagcatctttacccatgagccatccttacagcttgaagctgacattttagccctttttccagatattttattgtagctggctccagcttgcttctctattattctggatatctggaatgctttccataattcatctgataggagcttcttcaaatgtcacatccttagagaggggcttagctcttcctgtgtgactctacctgcctgtctttcatttctttcttcactcttttctcccctcgtactgcagtgtcccatgccttggtcctgaaaacctgactggagtggtgaaagaatgaggaatgaacagaaacactacagaaaagctgggatcaggcggactgtgtttgctctggtagaggacatctactatacaacaacctggcaccttagggtgtttcttatgtatagcacagggggaggagttagctagtctgagtagtaggttcaatagggaagcagtctccttatcatgttggagaaggaagttagttttttcaaactctgccagcaaaactagaaccattccttgtgctttgccatccctttaaccttaccccgggagaaggctttgccaattcccatggcttctgaggcattggctccttcacgtagctgtatgccaacaatacacattcacggaggacttcatccactctttacacattcacccaggacttcctcagcttcctacactggaaaaagaacctaggacttccacatgaatggtaagtcctctggccttctagcgctaacctagctttttttttttttttgaatttttttttgaaacagggtctatctaaatgccagactttgggaagggagtttctttcttgagggacctgacattgtcttaagttaccaaagctggccttgaactcacttttgtaggctaggctgtgtcagcctctctgctgtcaggatggccagcctgtatccccaggccagatagctctttggtttttcttttatgctgctgggaaccaagggccttgagcttgctagtcactggcttatctcttgagctgtaactgaatctagagtcttagtctcccctttctctcttctttttagttttttgagactgaatctcatataattcaaggtggccctgaactccgattctcctgcctctgcttcctgagtgctagatgatatgtttgtacctgctgacttcagtgtttcttaagaatgcattctgaagccgggcgtggtggcgcacgcctttaatcccagcactcgggaggcagaggcaggcggatttctgagttcgaggccagcctggtctacagagtgagttccaggacagccaggctacacagagaaaccctgtctcaaaaaaaaaacaacaacaacaaacaaaacaaaacaaaacaaaacaaaagaaaaaaaaaaagaatgcattctgtaaattggggccattttatctttcttactctccatcaacttctagagtgtgctcctgctgacctgtcacatgtgatgcttttggtaccagtgttctccaaattcttgaccatcagttaggaatgcattttaagttttattcatcaaaaacttgaatggaactttcaatagaatagaaaagtgcaagttccagctgggtgtggtagttcacacctttaagcccaaaacttgggaggtagaggcaggtgtgtacctttgaatttgaggcaagtctgttctacaaagcaagttctaggacagccaaggctgcacagaatgaccgtgtattaaaaaaaccagaggggggggggaggaagaggagaagaaagaaagtgcagtgtctccagcattcagcagggttgctttggattcttgaaccaactccagcttctgctatgaaaggagacccgaacatgggaatttagcccccaagtatttttttttcttcccttcagtatcttgtgtaggaacaggctcagatgctagtgcattaaaagataattagactattttttacagtggttggggagtaaggagacttggctattattagcaaagtttttttttcttcctctcccctcttccctggggttttgggcatgctgggcaagggcttcactgttgagctacatcccctgctagagaagtgttttgaaagtggttcactaacagcttgttcttagggcagagaaagcagaggaaaacatggctggtaattagggtgtctgcagcttggacagtgttgtgagcagctgagtgcctcatgtttcataaaagctagcccaatgcatcagggcagggaggtttccagtcaagcagctaagccataaagggacccccaaagaggcctgcccctactgtcacttcatcatttgtgtccctagctccatttctgtcacagaaggaaactcttgtgttttacctttgctctccacccaatactttctccaatagagaagttgacactgccctctggagcagctcacctgtcaccagtccacactgctgtctttagcatgtcacagatgatgcctccttctttaaactggacagtttgtcaccttggtgactcacaaagtgcttaacaatttagactctgagtccttaccctggcttggagtttgagggctcccacttgaccacacttggttcagttcatcgctaattaaagttggcattaatcggaaccaggtgaggtaacggtttcttgttttgctgtaatgcacaccatctgattaatcactgtggcaccagtggctcttagagctacacggaagccctggattctgccgacccatctttccttgtacagggatggagcagaggcccttgaactatatacctggtcaagtttgagagctttttgtttaagctgaaacatttgcatttctttgccgcaatcggtattttgtatctttttgatgttgaagagtgcttctcttaaggttctgcaagatgttgctttaaacttggaaggtttaggtatgggtaggggtcagtgacaaagttgccaactgtaaaactccacagaaattcagaaggacttagggaaggcagtgctgaggatgaggatttttgtaatttttcaaatttggggtgagacccacttatagattagaagtacttttgatgtttttcccaacacaacagaagccatcagattacattacagttgtgcagtaacacatttcagttatgtgtgttacaaaaaaggtacttcagcagttttcaggagtcctggtgtctgtctcatcactatttcaaagctggaataggaacatggcaggagtctgtttcagtgattctgatattaacaactgctttgtgacactagactttcttttttctttttcattttttcctctcaagacagagtttctctgtagtcttagccatagtacagactggccacgaactcatccacctaccttgaggcttcattttctttatttcatttccttttctttctttttctttttttaaagatttatttattatatgtgagtacactgtagctgtctttagacataccagaagagggcatctcattacagatagttgtgagccaccatgtgattgctgggatttgaactcaggacctccagaagagcagttggtgctcttaaccactgagccatctctccaacccttatatatatatatattaaaagaaactgatgtgtcatgagtgttttgcctgcatgtgcatctgtgtaccacatgtgtacttgttgcctgaggaggagagcctccatgtgggtgctgggaatagaacccaggtcttccacaacaagaagtgcccttaaccactgagctaactctttagccctgggctttgtcttcataagatttctttatgacgtgtttctgtatgatgaggacagaaggcataaataccctagaaccggagttatggtaggttgtaagccaccatgtgggtgcttgggtcttctgcaagagcagccagtacctttaattgctgagccatgactccagatgtgttttttaaattaacatattttatttatgagcgtgtgtttgtgtctgaggacaacttgtgcggatggaactcaggtcattatgtttggtggcaagcctctttaaaccactgagccatgtcgctgtcctggaataggttttctatgaactttgtacttttccctgttgaaattgtaaattggcttcagatgcttcataatctccccaaacttgcttcctttctggctattattgtctccttggtgttaccagagagggttgggcgcaggtttgttttcttggggattccttcttctccagaggcacaggctagatgtggattactggaaggagacagccgtccacctcgttctctgcaggtggattggcttggtgggtaggttgaactgtctgcggtccgggggagaggggtgaccgctcagccgatcgcaccttctcactggaggtcaacaccgaagttcctgagaggaagctttgcgaggccccgggcgcgtctcagagttacaagaggtggccgtgcagggctcgggcgaggtcagcgtgagtcagccctgggcgcggccgagctctgtgcactaagctggccatggctgaggggcgcttagcagcccaagtgggaaacccagtcgcttagcgcagcgtcgccagtctttggggctgggagggcggtgcttccgggtaggcccgcccagcctcgcctccagggaaccacgcccacataagaccacgcccacagggagcccctcccttcccgaccccgcccatccgggtgcgggcgggtggcgtcgcctttaagagctccccggtgttttgggggccgcgggccgggcgcgctgacctggtgcgcatgtcccgggcggtgacgccggcgccgggctccatgtgtgcggccgaggggcgcattatctggccggcggcgcgggcgggcggagcggcggagcgagcgccgcgggcccgggcggcccctcaggcgcagcgagcacgcgcggccggcgccccccgcccccagccctgtggacacgcgcgctgcccctgggcccggtcggcgcgcggccgggtaagttcctagcaaacttggcaaggcggggcgggggcgcgggaaagtgggagcgcggtcgtattcggtttgctgcgctgcggttcgcttcgcctgcgccgctggaaagttccccaccgccctcgcacgtggggctggggtcctggtccccggagccgggaagtggccgagtcgcctcactccctcctgagcttttcaggctgggaggccgccccaaggggggcggcgggcacacagcacgtggacgagtggcgtggggtgagagtccacgggagggtcgggggtccgagcccggctggcggcgttaaattcggcggcgacggcggcggcggaggcggcggaggatcccgtgtcagaataagagtccctgcgcgcccacgcctgcaggcccggtccccccccccccccaccgtcctgcttgggctcgcgcccttcctgcttgaccctggggagccatgggacccttccccctctcttggttcctgttttcctcatggccctccactttaaatttgcctccgggtgtacgatgtggctccaataatttcttttttcttccacctggaacgggttggcatcagtgactagacagcagcagctggccttttaaagggattaatgccaagaatcggaattgatcacttcaacaaggaaaggcttctgggcaggcctcagccgcagccggactgcgctctccggaaccctgaaatgaatggggacccctcattaagacctgtatggcagaatgttttgtttttccttcccgcccctgcagttttagcagaggctgcaagttctacctacctgactcacttcaggtagttcactcttatcttgtggctttggattctttaggacaaagtcctggtgagtctcctgagccttacattttcttgacagcattaacttctttttatcttcttggagtatgcagcactcccacgtccctgttaatgtgtgtgtccattcacaaagcgatagatacctgttgtggatgtaatctgtatactgagcctgagtctccctcttgttcttctcatcctaccattcggtggttacggtggttacaacttttctttaaagcaacattacaccacagcactgtgaataccctccagtccttagcttatacctggctctcagtgtgcatgggccaagtttcctttgcaggtatagcaggtaccaaaaatgatccttctgatgtataatacctaatttccagatgagaagttgtagcttctacaagtcctgttgttccctcactgcttagtgaaggggcagagatgtgattgctgtacgttttctgcattagaactggggaacgtagctgctttccccttgtatgtgagaattccccctgctctagtacatgaagcaagctccttgtacctgtgcagcttagaacaccatgccagcctttctgtgtcctgagagaagagaatccagctggcctttgagtggcatagccaccacgcttgtgcttcagacccagagttctctagaggaagcagttaagtgtggtaatcacccactcttactcctcactctctgtccacctctcattcttcttttgctccctacaattctgaaatactttaaaaaacaatgtcattttttgtatgtttgtactcatgagcatgtgtggagtcaggtcaactttcaggatttgcttcttccaccatgtgggttcagagaaagagcttgtgtgaggaggcttgggggccaagtgtcttttccagctgatcaccaggtcccaatcctctctttaattcaaagattgcttttccccttggaagctgagtagctctggaaatgggagcatttgtgcattactgattgatcgctatgccttgttagttccactttgatgacatttctttagtgtcatgtcatctctattagtgtgttatttggcaggtcctgtgatgaagcatattatgatgtaaagtgtctgggttcaagcctccttgggaagctttctggaatcttgcatctgtgtgctgccctacctccactcccagtaacgagctattttgtgttgttggttttgtttctttttgagactgggtctcattctagccaaggctggcttggagctcactgtatagcctaggttggcctcaaacttgttacagtccacatcccttatttgagtaataaagccattgttaagacttagatgttcagttctccattagctgtctgacttgttctgcatcatttattctgtgaatttctggcactacaagtagtgatttgcagattgatttatgtagtacaaatcggtgtgcatactgtgcctctggctttaatactaggactccctgattgggagaagtgagtgagattagtgggccaagaaaacttaggggatgaaggaagaagggctgtatgaccttgtgggcctggtgtgggagcttttctcttttggggtcactagtagaagatgagtacataagagaataaggtagtttctgggcagagagtgcttgaactgaagggagctggaattgttctccctctcttcctccctccctctccctctctccctctgtgtgtgtgtgtcgccccctcccccccaccatccacctctgttgggtactgcggcagccccatcccagccccgtcccgaataggcttggctggctggcagctggtatttcccctgagagcagtgtgagttatcactgggttagacagagcccaggccaggaccttgttcgatagatctaaacagacaaccaactgaggaacttggtgggcaagcatcgccacattcagcagagttagccttgtctggagaaaattaagatcttgacttgagcagtcttggtgttcagcccttcctgagagttgggcttaagactggctccagcacagcacagcagctgagtacctgagtgttaagactccagtgtttttgtcccttactgggagtggtagaactgttttctctgccctcataagtgaagtaatttatgctcagtgtaaagagctgggaagattatgaaacaggctggtaggtgcagtcttagaggagcatggctaggatttcctcctaagaaccagaagaacaagttgtcagcgccacagtttgaggctgagtgtggtcatggtcagtgtggatgcagcttcaggaggcaacagactgtcaggtagtaggattgacttcatcgtctgtcacctgaacaaagtggactctttggattgaagtacgaaggcagtgattgagctgatcacagcaaagtagatgtcgacagtatgagggaaagaagagttcccattctgcttggcaccagaagactcctgccgatgtggaccagtcaggagaatgtcaggctcagtctcccagcccccccgcccccgagctttccaggctatatttgtgacctctttttgtctgatgaaaatgtaggttactcttttagaagacaaggatttattttggtggaattctgtaggtagcttcaggacggccctcattttgcccagctagggacctcttgctactcctgtgggctgtactgaatgaacttctgtcttcatcttcgaagaagtacttgtttcccagatgaaatccttagggatttttgttccatattctgttctactttcagttctgggttctttatatgaaagggttgatgtcacctatgtcagggcctagaacatccgtctgggctggggggttgggagggaagaggagttcctagcaggttgaggtaggcattgtggggggaggtttgaggttgtaggaccctggaggctacttttcctcaaagatagctcccggatggagctgtggctggagagagggtaaaggccacttgttttaaggatttgttagcaacatctctagcagttctttgcaactctgagcatgatcccacctcgctagtttgataggtctgttcctacagcctgcctaaggtggtgcctttgagtgctttaggctgctggatggcctgacttagcctgctctgccagggtatgagccccacctgccccttgcaagtgactggctgctgttgaaccaccctttggtctccttttctggaaaaggggtggtgttttctttctgcttggaaaggctgtgttgggagttagtgagataaggaatgttcagtctcttcatgcctgggatttagacatgggctccagcatacatagtgaagtactttcagaaatgtcaggccacagtgctctcctgtatggaacacctttaccctgaaactgatcatcaaatgtctgtatgccctgtggaatctcacctcaacttcgtgtcacagcttggcctcttgttccatccagatgaaggaggcaaagtccaaaaccataggagggcttgatggtcaccttctgggttgtcctctgaagaactcatgccccacctttctcactttagttgttgttgttattctcaggcctctctggtaacaccaaatggccagattggctctgtccttgtcaggaaaggaggctgacttcttatagagctcagcactctggctttttagctatctttgttatggtgtagctactggtgggttgtggaatagtgaatgaaacactttttctagagtcccttctagagaacagctttctaggtagctcttcagctagcttgagtatacaaagctgtctaccaatgcttaatttaacctttttcatcttagttgggccacctgaccatgttagcctcaccttgttcatctgttggcaagtggtttttgacttcctagcatggctgtgaggaaagtgggaagtgtcaaccagtgaatcactgaagttcagcaattgggtgggtgggttcttccccccctccttccctcccttttccttccttcctttcttccttccttccttggggtggggtggggtggggtggggtggggtggggggttggatagggtttttctgtagccttggctgtcctggaactcttagagatctgcctgcctctctgcctcagagtgctgggattaaaggtgtttgccaccactgcctggctagggtcttgtctcgtctcttctcttctctttccttccttctttcctcttcttcttcttcctcttcctccttttccagacaggtttctctgtgtagccctggctgtcctggaactcactctgtagaccaggctggccttgaactcagaaatctgcctgcctatgcctcccaagtgctgggattaaaggcatgcgccaccactgcccagctctttatttatttattttatggccggacagtggtcttggaaaaccaaaaaaaaaaaaaaagatttattttatgtatgtgagtatactgttgctgtcttcagacacaccagaagagggcattgcatcccattacagatggttgtgagccaccatgtggttgctgggaattgaactcaggacctctagaagggcagtcagtgcccttaaccactgagccatatctccagcccaaaattttttatttttgagacttgttaccaccatgtagccatggctgtctggaacttggaatgtagaccagcgtggcctcttagatcacagagatctgcctgaatctgtctcccaaggagttcactaccaatgtgtctgggttttctttatggtagaatcccactacaagccaagggtgtggaggttgccttttttttaaagatttgcttattttatattgtgcatgagtgttttacctgcgtgtttgtaccagttatgttcctagtgcctgtggaggtcagaagttcagttggttgtgagccaccatgtggatgctagggatggaacctgggtcctcgacaaaaaacagttaatgctcttaattgctaaagtgtctctgaagccctgaatgtggacgattggaaacaggattctcatatgcatgtttgtcaggctatcctgaaggagaaaggagcacctgtgtgataaacctgctttttgctctgccccagcactgcttcagacatagcttctgcagctgttggcctttgagctggcactatggaacacttcctcaccttagctgactgctcacctcagctggtaacttgggtacaggtctctgtttctgttcttttgagtttccaggtgtgggttttgtggtagagatagagagatggagtttcttatgtgctcattcacattcacagatgaaacatttttttccacctgcttttggaggtttgactaggaaagcaaaatggcacgtatgtgcacagctgtttttgcactttaccttgttcctttgagacagagtctctcgctgagcctggagctcacttggtttttaccttggctggcatccagcaaggctccgtccgaaattctgctatctcagtgctatcccaccacagcactggtaagcatgaggctgtgatctacttgttatgtgatgctgggaactgagctcaagttcttgtgtctaagccacaggttcttttaccttctaagccatttagtcagcccctgatagctgttttttgactgtagcttaggcttgatttaaacttgttgtgtgccttctgcctctgcattctcaaggctggaatcacaggtatgtgccatgaatgcttagccaaaccaaattgacttagagctggattgaattggttgagtcacttaaacctgtggcatacttggcttgggtgtcattgattgggtgcctgagttttctccagtgtctcatttggtgctgcagcttgtgagaaggttgaatcttacaagtggtaacctttcctcagaggattcttgaaccagctggttcaaacctgagggtttctcttatggctatgataggagcacagttttggtatgcttgcctttttcttaacttgcttagtagatgaactcaaggctcctgcttcagttcaggaaagtttgcttgcttgcttgcttatttgtttgttacaaaggtctcactgtgtaggtctgactgtctgtgttgactaggctagcctctaactcagagatctgcctgccactgtctccagagtgctggaattaaaggagtgtgtcaccatgtccaaaggagatttattttttcattgatttactttttaatgctttttgtatgaatgtatatgtgctttgggtgcccacagaggccagaacagagtgtaggagcccctggcattggagttaaatagatggttgtgaactaccatgggggtgctggaaactgaaccagagagagcaagaggggccaggtctcttaaccactgagtcatctccaacctgttttttgtttttgcagtaaagttttgtgcaatcttttctcctgtttacctgcagaaatcatttcctggtgcagaatcctgggggtaaaagtaggaacttgacatcagaaatgaatggtactgtctggcctattttattttttgctttttgagatagggtctgtctatgtacctgactgtcttagaactcactgtgtagagcagactggccttaaattcatagtgattgactgtccaaaatctcttttggtctgtctttgcagcctgagtgctggggttaaaggtgtgggtcaaggcacctagctgttcatttttgtgtgtgcctgatgtgtaactgtggacacgactctccttccacctttaactgggttttagagaaggaactcagatctccaggcctgtagcttataagtgcctttatcatgcttagtcatcttgctggccattttgaagttaagggcctgagtctgtcattgtgattatatttgtcaggctgtttcattagaaatagaactgttaggccaagggaggtgattaatggtactaacatgctttgggcttagcgccacaattaaataaaattaagagtacctttttgagcataaggaggtagctcagtgggtaaagctggacaccgagcatgcacctgtaatcctaatgttcctacagagatgactgtgaatacaggaggatcctgggaggctcaagggttagctatcctactgcacacagcactgaacgcttggatcggacactctgtctccaagtggaaggtaaggactgaaacctgaggttgtcccttacctccacacatgcactttggcttgtatgcacctgtgttggcatgcgtgtgctcacgtgcatacacacacagagatttttttttttaagtagccttttagacaacagacagatgtagcatcccttgtaggctttcctctgtgctctgctctgctgaaccccatacttcagtgtgagccaagagactcttcaaactggaaattaaggcccaaaagggagagagacttcccatcattgatttgtagtagaaaggagcttggcagcttgatcctcctagaggatccttggtcagtctgtctgacctgtcatttgttttaggtttgctcagtttgtttatataggtccactggccagtttcctttctcctggccttgtctgcttttgaacttgaagtcaatgtgggtctctaatgagaagagaataggatgtaaggaggaagttatgcagggctgcttcttggggcttcagaaatccagtgggtgatggtttagagcttaagcagtgtttccttgtctctttaagaaagtaaatgtgagctgggtggtggtgagtttgaggccatactggtcttcagagcaagttccaggacagccagggctacacagagaaaccctgtctcaaaaaacaagcaaatgctgggtgtggtggtgcatgcctttagtcccagcacttgggagggagaagcaggttgaatttctgagtttgaggccagcctggtctacagagtgagttccaggatagccagggctacacagagaaactctgcttcaaaacaaacaaacaaaaccaagcaaacaagtcaaaaccaaaaaggtaaatgcacctaactataggcatacttgagatccagaattagccctggcagtggggagcagcaagcagaatacctgtcaaccccacagcagctctcactgcccaagcctgtccaggggacatcctgctatacgcttgcacatcctgctgtgggtgatgttggcagaggactcagtgtttttcataatcccctaatctgtgctagagttagagccccaggccctttgtatgctgcagtcaggctgccccccttgtatggcttttgtgtctagaaaagcccattgtggctactggggtactcctcatagtcacaaaagagatggagccaaggggctccaggggttttagggaaagcaggctattggtttgggattgggaaggtgacttttttgatgttagagattgtggggagtgcagaggggttttctctctccagagagaacagagctgcttaggtggcaggttggggtggatgataggaagacaagtgtgtccctagtccttacccagataattttttgagctgtgagaaggctttgattactccagcatctctgtgccaccctctcctactatcaaggcagggatatggtttcttaggagtggtggaatagccacttcactctctgaaccttgggtttatgggcagtgtaatgggcaggagctgggaagcacaggctgttgggtcatggttgagcatttacacaggagaacctaaagtgtacttgcacaggactatgtgagtttctgttcagggaagccatggggaaggaaagaccattggtgaagacagattggtgcgcccatgatcttgggtttgtctgcctaaataaaagaagataggtgtcagagacaccttgggcagattgatggtggttatgtctttttgcttagcaactgttgggaatatctcccaggctctgcctcttctgagcactgagatcctgtgctagtacagatgccctcagttggccttggaggtcatggagttggggaaagggaagaggtgtaacagagtgccctgagacaagaaggtcagtgggaggctatttggaatggcacttgagtggggactgaagggtaatacagctcccaagactgagtatgaattttaggggtacaaaataggttgttaggcagagggaggaagacctgggtcttagagagaggctagatgtgaatgagatagcccatagctctgggtcaacttttcctgccttgttgccctgaatggaaatgtgatgagccaaatgtgaccatctgctctttgagctcaggaagtgaatctgaccctggaggaggtgagtttggagtctagtctgtagtcaccattccttcccagacagtagtgctctgtgcaagcacgagtgtggggagagttgtgagaaaattatggcaagtctcttgcatgttcaggaacagcctgctcagcttttctatcaaattagaaggacccagctcctaccttagctgggaaaagagctttccagcaagtccagggcctaggaagaggcttgggtctgctgctagagtcttaaaatttggtttgattgggagctcatgtattctaggttctgaggctattcaagcttggaggattttaagtttttatttacataattaacttttttgagactggttttatgtagcctggcacttggctgtgtagtcaaggacagccttgacctctagatctcctgcttccatgtctcagatcttggaatgacaggagtgggttaccacatctgacctggccttttttttttttttttaatttaaagacagggtttttctgtgtagccttggctgtcctgggactcactttgtagaccaggctgacctcaaattcagaaatccacctgcctctgcctcccaagtgctgggattaaaggcgtgagccaccatgcctagcctggccttttattttgatgtaggttctcttcatagcccggactgggctcaaactcttcctgcatgagccactctatctgacgtccaattggagttttggagccttttccagaaagacccaaggaagtagctagtattatgatgatgctgccaaatctgtcagcctgagttccatgcctgggacctgcatggtggaagaagagaactgactcttacagttgttctttgtttgaaacatgcatacctactgtcatagagaggctgggggtggaactagagagatggttcagaagttaagagcacttggcttttcttccagtgcacacacatcagacccagggcatgtaagttaatcggggactggagaaatgaaccagtggctgaagtgctcgttatgcaagcatgaagatgtgagtttgaattctcagcaggagcaaattctgtaatcctaacattgactatggggtgatgagatggagacaggaaagactcctagttcacacagccagttagcctcacttcagcaagttacaggagctgccttgagatggaaggtgaagactgaagtcatctctgaccttcacatgcaagacttggcacttctgtgcctatattcacacacttaggcatcatttatgtatacatataggaaaatttctctgaaacatgttatctagtagcttttgtgatggtttcgtgaactgcccagatggttttgagttttagctcttctggcggacttgagaggaaagatgggtgttctttccaggatcctggcttgaaagtggggaagggatgtgtttgtaggtaggagacttgagttaaaatggcttagcatgtgagtgattgctaggtctctgtcagggtcctgattagaggctgagtgggagtgaggctaggatgagctatgttctggtgaccagttacccttagaagttgtctgcagacagttttttccccctcgtgagacagggtctccctgtgtagttcaggctggttttaaactttggattctcttgcctcagtttcctaccactcttggctgcacacatactttgtgtgagcctgattggctcttgtgctgtcttaagttgtattgtattacctgttagagatgaaggtaaagatggctcttagcttatgaaccagcctgggatttgtctgtaagtctctaaacccccctctttctgcttgtaggctggcaagttgttagtgtcttgtcaacagagtctggttgttgttgttggttgactgtgcttctgggactcaccaatatttttaaaacaaaaggtgaggattgacctgtatcagtctttgagtctgcctagagcccccaggcctgggctatgtagagcctggggctagagtctcatcagaatcagtagaacctaggccttcaagtaccactctgtttacacctgagagacctaggccgcggcttgacttgatgtcttagcttcaggtttctcacctgtcaagtgtggtgtcaatggaagtcccttatgtgaaagggtaacagtgatggagaccttgagggtcatgatggcagtgcttcctaatcgtgggtgggttttgctggtacctcctgggtaccaggtaagtgatgctggcagcccttgattctggttatggggatcaaaaaatatttatctggcatcagaagaccaatccttatgtcctattagcatatagaccttaattacttgtttcctgtcttgagttgccaaacttgtggatacttgagattagagttaacagaggttcctaagcgtgtaggtctgtccagctgctcccaggtaccagctcctgtcatcagggaatgtagaggtgctaagctcattttctagaggtggaggttaaatgggagcaaccttactctaaactgcagatttccctttctctagttagacgtgcctttttttcgagacagggtttctctgtgtagccctggctatcctggaactcactttgtagaccaggttggcctcgaactcagaaatctgcctgcctctgcctcccaagtgctgggactaaaggcgtgcgccaccacgcccagctctctctttttttaaataagcttttgtgagacaatgaaatgactcggaaggtaaaggtgcttgagttaattcctggtttccacatagtaaaaggagagaagttgtcctgtggcctcctcatgcatgctcccacacagaaacataacgaagggaaccccaggcaactggagaggctgctcagtggttaagggcactggctagtcttcttacaaaggtcctgggtttgttttccaacacctacatggtcgctcacaaccatctgtaactcttcttccatgagatctgatgccgcctttggcatctgtgggcactagaaatacatgtggcacactgacatacaggcaaaacagccatatacataaaataaaaataaaataggtgtgcataaggaggcagagacagatggatctttgtgtgtttaatgccagtctcatctatcaatagtgagtttcaggccatccgtggctatatataaaccaccctgccttaaaaataaatgagtaaataaatgtacttttaaataaagaatgtgtgtgtgaggcagtttgcacatacatggaggccagagacatgattgtctttttaaattctgcctcatcttaagccatctttgggtggctatggtggcacatgcctttcatcccagcgttcataaagcagaagcaggaggagctcttgagttccagggcagccagaactacacagtgagacagaccctgtctttaaaaaaataattcttagccggcagtggtggtgcacacctttaatcccagcacttgggaggcagaggcaggcggatttctgagtttaaggccagcctggtctacaaagagttccaggacagccagggctatgcagagataccctgtcttgaaaaaccaaaaaccaaaccaaaaaaagaaccatgactctttttggcagaatatatggtttgattccagtacccttgtggtgtctcaaaaaccctcttaacctcatctgtcattgggcatacacatgacatataggctggcaaagtacccataaaataggaaaaatttaagacaaggttttactctagttcaggctgtgcctctgaactgttggaaatctgatgagtgctgcattggtaggtagcatcaccatgcctggctcttgccctgaacctttcttacctgaaaggacaatcacaaccagcatcagaacacaatgcaggcaaggggactcttgaatggtctctgttgagttttccatacagcctccatgctgaactctgcctatggggtaggctgccttggtgctcaggattccaggttgagagttggcattgtgatgctcctgttttccctctccctggtatcagttgatgggggtccctggtatctgtcttgttgtcccccttacttacaaagttggatgtgctgggagctggctctctgtctagggcaacattttgtacacaggctcccagggcgctcaggtttccatttaagggaagagtgttgccaagatgaagtggtcctctctacttgctggtatcctgggcttctcttgcttgtgctataaggtgaggctggaacaggtgtgttcccagggaattggaatgctgtggtaggccagggctgtctaggaaggccaggtctaaggtgcttgggcaatgctcttagaacactagtcacaggctttcctgggctcttttctgctatgcatttgggaagttgcagggactgtttaatgctggagcttgtctgggctatgatctgatagaaacaggtactaggccctgggttgcactgtgacatccctgtgcatgcaaggttcaggagggctcaatgatacaagtagcttaaccttgaaagcatgtgacatggctcagacctcaaggacacaagctgtgtgatttccccatcctccaggagctttctggaataaagcaagctgtccttgcagatggaaggcaatgataggtgccagagactggccagggagtagggagtttcacttttacaagttctgtaaactatggcagtatttttactctttattttttatatttcattaaatgtgggcatgggaggagtttagaggacatctttcaggtgttgtgggtcatggaggttgaactcagttgtcaagcttggcagcctttgtctgctaagccatctaactggcccatgtaaacttttggatgggtgtttaagacagggtttctctgtgtagccctggctgtcctggactcattctgtagaccagaatctcttcgaactcagcttagtctctacctttccaatgctgggattaaagggccacgaccacctggcccacatgtaaacatttttttttttaaagatttatttatttattatatgtaagtatactgtagctgtcttcagacactccagaagagggcgtcagatcttgttacagatggttgtgagccaccatgtggttgctgggatttgaacttcaaacctttggaagagcagtcgggtgctcttacccactgagccatctcaccagccccgtaaacatttttaataatgttaaaccacacatttaagaatggtcacaataagcctagcttggttaccaggtgaagcagggtaatctccatactacagatatgaggccaatttggactatagtaagtctctgaagtggagaaagttaagagttttaccttgtgtgcattaattgcacaaaaatatgacctcaaaaataatttgtaactatgaggacatggatctgtctgttaggattagttatacacattgaaggcctgacttgtgtcagctgctaagagaaatgcttgtcactctagaaggttcattgtgacatcatcttgtaggtagagtgttggagcacaggaattctttggtgtttagctcctgtagggggaggacctcctccagcttggtggggtgaccctcctcaagcccctgaaaccaccaggaaatactggggagagtcttaggtctccaactgccctgcttggggggtaacaggtattcatcattttttccatagctatttgtcaatgtgtctggaagtatgttacatactgatatattcttgcagagggtagtcagggaaaactgtctccacatttcaggctgagtccttagtgacctcaacatgtggcccttgagcagcacacaccagcaggacatcctgtaattcagctctctgcccacaacagctccctggagtctgtgtttgctcccacaggaccaaggcttattattctcaaggctgctcctctttgttacccagtgtggctctcctgggtttctgatgactgtttatcagtctaggttcctaggtccctcctccagcagcttttagaactcaggaagacatgttcctcttcagtatgggtgttgcagtgttgaggagctacagggctcatcaggcaaccactctccaggaacttcctatgtcctgttgtctggaagcttccagagtgctaggcctgtggatgcttttggagctttatggcagaggctcaattgttggtacttttggtactgggacccactagcctccagcccctctctttgctttcccacccagggattgagtgggcagctaacttatcactagccagcactggagccttgtccatgacatgagcactttggaggtcctaaggactttgagaacctcatgccaggaaaggggtggggaaaaaggagttatcacaggagagcagtcccagcttcccggcaaagaagccatttcctctttttcttgtcacacttccttcaggtgtctgacaagcttttcacatactgagcatctcagtgcttagcacttcagacctttctgaggcccacagaccttgccctcagtacatttcaatatgcaggtgtgtgcagttcccaccagttgtgtggacattgggaggagtgtccacatccacataggagctgagacgttttgaagaatggctttaaatcactatagccaaagtaagaggtagtggtttcctgtggaggtcctgcctggagcagaggctgtcacttggttcacagcacagtattgaaggagcttcaggagggaggtgggctttttcagagggctatgggtcattgagagccacagctggccaaaagcgttttttgagcctttaggatggctagtagggaaggagagtatgatgaaagtgcctgctttctgatctgtgagacattgggtgggatactgtacctctgcagtaagaagggaagggtgctggttaggggctcagtagagaccacttgcctactttgaaagcagaggctctggggtccatttctgccatttcggagagagtgagagagaaaaaaaaaggtgtgtgtatattatgccaaccaccggtaccaagacagcaatgacagggagtcacagggaggaggcttctctagactcaaggctaggcctctgggaccttcagctgtgagaggctgaagcaacagctgctctctgggaggcctggactcatgctgggggctggggccgacatggttgcctcttagccttggattctgagggaagacagtttgtgttttttgactggttttgccccaagtttgtgatggaaacattgtttgtgggtgctgacaacagtgtagggggtcttaacttgccacatcccaatctatttaacttggctggatgtgctggttggggagtgcttgcttaagtgacagggacttgcaccagaagtggcaaaagggaaggaggacatggcagggacctgggcaggtgtgaggaggagcaagtaggggagagacaggcttactggagtcatgatgtgtgtgtaagtgcatgtgcacattcgaaccatcataagatactgagagggtgtgtgtgtgtctgtccatccatctgtctgtcttcaggggtatcagggagggtgtgttggctcattgtgagatgatccatcctccatcaaagcctttattaccatagataggggaggacaaggtgagccagggattgtcggtgctaggatttgagatgatggacaggactctaccattctcatcccctagtcctagctttggttgccaaggggatgggctgtatggccagtttccccactggctcctttgctttcctgggactgtttctctaagtctctagtctgcttagtctgatatgtccctgctccctagggacatggttaacaaggtgttttgccctagggagagcaggctctgcactggttccctgggggtgacctggagctggagcccaagctatgccctgtgctgttggtggctggggtccctttgctcctctcctgaacagctccaaagtgctccttgctagcccttagaggtaaggttccttattttgagataatgcttttggtttaactctgtcatgtatcaccactgcttagctctgtcattgtaggcagacacagagggagcattggttgtgactatgtcccaggaaaactaattgcttgaatgtgggtagcaggcaatagggtgccagtccctaagttggaaactgaatggttctgctggagcagaacttagcaatagagcacacacagtgtgcatattgctagcacctgggtggaactggaactctgagttctaggccaccagggctacattaagaagcctcagccaggtggtggtgcagcagcacacctttaatcctagcacttcagaggcaggtagatctctgtgagtttgagaccaacctggtctacagagttagttcaattatgattctgtgttgctgggtatggtggcgcatattttaatcctcacacttgagaggccatggcaggcttatctttgagttttgtgtgtgtgtttgcgtgtgcgtgcatgtgtgaatgagtgagacagagacaaagacagacacactgtgggtttgacctaatcctcctccacctgccagcactgtggtgcctcctttgttgcttggtttctccctttcaggtgttatgagttctactcctagagagggtccaggtgagctctgtgaagtgggtagatgcttggtttgtgcagggcaggtgcactctgggtttggaagggtcagagacaggagcaacaagaagtactgggttcttggatctgtcaggagaatatgggggccaaggtggcaaatgtgtgggtgcagactgcacaggtgtcagtgaaggcaggtagtggagagagagtagaggggagcactcatgctttccagtcctaagagtgtagtatagtcagcccttccagtcaaatgccagtgccttcatacacctgtgttgtgctcctgtgtgttggccatgagtaacgtagcaggcacttaattctgccttcatcctggagttaaagggagcatcctcccagaggatcaaatgacaacaaaagatggggcagccacagtgccaaggcttgatttcatgactgtggctcccatggctatcttcctgtcaaagtgtggtttctctccaaataggacagaaggtcagggtcagttacaggagaagggtatatgtgtgagtggaggacccaggtgcagggtcaaagctaaagtgtaatgatttatcaggggaggtaaagagtctcccatgagctggtaattgtgcacttaagggttacttgatagtgttttaaatgtatgagtttggcataaaaacagcaaagctttctgaacccagttagtgaggtgcagtggtaatcacatgattagtttcaagaaatgttccttgttgtggaaatgctaagtgggttctgctagatctctactcatttcttacgagagtcacattgactgactgaaggggctgctgcactgggctccccagactaactcctccatcctagcctattacccaagtccaaacgtacagcactagctgtgtgtcacacgctctaggttgctgaattgaagccaggcagaatctgatagcacagtcttgccttactgcttggtgggaaggtccacagacactggagctgcactgggtaggggtgggctgagggtgccttccggggaactctggagcagactgggttgggggccactagcaggtgcagcaagaggcagcagaacaggctgataaatccaagcacttctccagggtagaggcttctggaatgaggtgtgtggattaagcatttcttagagttttaagtgtcacagtggcctggtacttatttttttttttaggtctttctcagttcagagtggagaattggtgtttatttttattattttggagctagtctattgttggctcattacagtcttgcctcagcgtcctgtgtggctgtgattacacatgcaggcatccttcttgatgacccggatttgaaagtccatctttgtagaggttttgtttcagatgtgaaatgtccacagtgggagggtgtttgatgtataaggctgggccagaagtccaaaaatgagatttatttgggtggatgggcactaggctggctggcctctggggtaagtttgatgctttgagtctagtcaactgctaatacattgatagatggattaagaatgtacgtggtgggctggcaagatggctcagcagataagaacactgactgctcttccagaggtcctgagttcaaatcccagcaaccacttggtggctcacaaccacctgtaatgagatctgatgccctcttttggagtgtctgaagatagctacagtgtacttacatataataaataaataaatcttaaaaaaaatgtacatggtttgtgtgtgtgtgcttgtgagaatctgttctatttaccatgtgactgtaggggcttgaactctgcttctcaggcttgcctttacctctttagctatcttgcttgttcagaggtttctcgaaataaggaacctagttcagaaacattcttcactttagcagagaggacagtttggccatttagagaagtggctgaaattccatacatatttaatatcagaactaacagaattgagttggggagggtattgtatacctttgatcccaacagacagagacatgaggatagcaatgagtttaaggatagctcagggctatgcagagagatttcatgttaaccctgaaatcaggtgattctcctacctctgttccccgctctgagagtataagagtatgctaccatattcagcttctttataggctgtgagtcctcacgcttgtatgataaacacttgtgctgcagttacgtgtccagcctctgctcagggtttctgatagcagatgcattgtatttgtaggtcagttgggaagagaatttgtacctcctaaccataaataagggatttctttccatttgttttgtttacttttgtgatgttggagatggaacccaggcctgattgctgccaggcaagctctctgctagagttacatcccagctctgtggtttttgtttttgtttttttgagataaaaatctctgtcttgttctagagtcaaaccatcttcctatctcagatgagtgccaggactttaacatgactgtaggtttttttttccccttatgcatcatgtttttatgcctgttgtaaacagattctgttgtagtcttcacttcttactgattgatgtgcctctggaaacacagctgactttgtgcactaatggcctgtgaatgacccaggccccagggtcttgctaactcagaccatcacaaattgagaacatacaagcaagggtttgcaaggtaacttagccaagtaaggtttaccaccacctgaccactcaacctgaatttaatacttaaaacctacatagtggaagggaagaaccagcttttgaaagttgttctctgacttctatatgcagtttcactgctttcttttctgggtgtgggactgtaagctggaggtgtgggcattggccaccaacagggagacatgatcaggctgcatattgctagcctgggaacaagttgagactcaaaagctgaaatgcagcttctacagaaatcgtagcttttgttccatagtgaagttgaaatcatcccagggtggggtctctgtgctggccttgatcctgagaagggacaggtgtctgggcacctagactagggttccctgtctctcgctgagaagcttgaacttagtgggtcaggcaactgagggataacagcatttgcgggatttcccagtttacactgagctggaaggccctggtagtgtctatggcaagggtcttttacatgggaggagtcttgtgctccttgatacccaaaggtctttctggcaagttttcctgtgagaatatttctttttttttcttttttttttttttttcaagacagggtttctctgtgtagccctggctgtcctggaactcactctgtagaccaggctggcctcgaactcagaaatccgcctgcctctgcctcccaagtgctgggattaaaggcgtgcgccaccacgcctggctcaagaatatttcttgagtcacacattactgaacagagtttagaaaagagatttcttggtgggcatggtggtgtgtacttttactctcagcatgtagaaagcagagacaggcagacctcttgagttctagatcagtcagagttatatcataagatcttgtattataaactgaaaactaaacagaaaaggtttctttgtaaaagtgtgtatgagtgtttttcttccatgtatgtgtaccatgtgggtgctaggaactgaaccctggttctctacaagagtagccagtgcttttaactgttgagccattcctttaaaaacaacaacaaaactggtttcttactagtatgttttcctgggagttgtatggacacaaagaaagaaaacagaggtggtattgttactggacaggccaggtgcataaaattctgaaagtgggacccaagctgacaccacagactctgggtcctgtcatggagccactctgcccaggaatttggacttcttctgctatatctatatatagcagacagtctcttcttccctggtacttgtgccctcctcatcctcagggacaaacttgtacttcggcactggtggtggttcagagcgagaaccccactggtctgcttgctgggcaggtttcctgagtatcagatgtatcaagtctctgttttataaaattgggcctgctccgaggccatccctacattagatcagcacctgtgtcagcttggtcttaaccattctgttactcctagcttgctgtgaggacagcccttcagtcatttactctgtgttctgggtgataaatgagaactatctagacttggcctgttactcagtgttgttgtcatgcttttgttgagagcttccaaagtaggtctggggtgttgttcacaggttactccatgcccactaggccttagaaattgatttgcttgtctgggctcctgttgtggagggcagcaatggcagagttcactattcctatgactggaggcattttcttctattgtggatgctggagacagaacccaggtcttgcttatacttggtaggttctaccactgaattacacctgagcactggagaagtttgaaatttcctgattcccaaccattttatggaactcaagtgtttttctgttttttggtttaggttggccagcacattgagccagcacatccacataagttgccttttgacagaactgtggccatggcagcatggtaggatccgtgtcccggaccctgaggccaggtgagtgctagagactggtgtctatggaatggaaagctagcttagataacctctacatatctgataaagccctgctcaggaaggaaggcagggagttgggttcctgtggcatcaggtatgacccttgagccttgggatagacaccatgtttattggtcacctgctcaaaggcttgggggtgggggtgggggtggggggcagccagagactaacctttgatctccagctgtatctcctcccagatggctagaattgttctttagccactgcccagctagctctaatgtggaaacttcagctctgcagaatacaaaaggccagaacaggggaaggaggggcctttctattgccaccagggcctcacaatgacatttacatagtgacatttagtgacacatgtacctgtaaaaggaggaggaattgagtggtatcctagaagtagggcatggcttcaaaacctcctaggacagctgtcacagttttaaggctttaagactgtaacatggtgtcttaccaaatggtttaccaccacctattggcatctggttggctcctgagtgagatttggctgctctgacatcctgctatgctggacagtggctgtgacagtgttagggttagagttttgggtgtttttttttttgtttgttggtttgttcccccccaccccccagggtttctctgtgtagccctggctgtcctggaactcactctgtaaaccaggctagcctcgaactcagaaattcgcttggctctgcctcccaagtgctggaattaaaggcgtgcactacctaccactgcccagctacagttctgttttttttagggttttttttttctctttaatttatgtgtattagtgttacacctgtatgtgggcctgtgtaccactcacatgtcaggtacctgaggaggtcagaagaaggcatcagatctcatggtattgaagttaagggtggctctgaaccaccatgtgtgttttgggaattgctgtgtcctttgcaagagcagcaaatgctcttattcttgacttttgagccatctctccagcccctttgttttctgagacaaccctgtctcagaatggtattgccatgtagtccacactagtcttgttctttttcgtcagattcccaagtgctcagattacaggtgtgtaccactaactctggcttgtttcttgagagagtattattatgtagcccagatgaactccaggtaatcctcctgcctctgcctctgcctcccaggtgctgggattgtaggttttaatttatgttttctacggtgtgtcctggtttaattctaggccatatttaccttttgctgcatttggggtttcctgatccctggtcctcatgtgctaggcaactcttgtccattacaaagatgcacacagaccacatgcccaccccagcaggcccttctgctggctcaggtttgtggacaaagtgtttatccttgggtatcatttgctgggttgcaggtgtgtgtatatcttttatttggtgtagggatcatgctgactcatgtgctaggtattagagatcttaagtgaaattcggctttaggaaagcatatgcttcccagagaaagcagtacatagccacagcacagtcagcattgtcttcctgctaaggaagattgtgcaagttgcagagtccctgagacatctttgctggaaaacacccagctgtggtctctagctgctcctgtagaggagatcagtcaggccctactggaatcatagaactactatgtttttacttagaaccaaagctctctcctgtgggtggtgggaaaggattgtgacaggggagcttattattactatgtaagcacctgggtgaaggatgtgggtagtgaagtgatcctgtgacagtagtgacaaggtgagggatgcagagataatgctggccagagcctcttgtgtgtggggttctatcattttcagtcctacacaaagtacagcatgaatccattttccaaaggaaaggtgtgtgtgtgtttgttctttattactaaaaacaccattactatgtgtgctacaacgtgtgccagtgaagggcatgtgcacagcatagcatggtgactgtcaggtcttgttttttcctgcatttttacactagatgccagttttgtaaagctagccagttggagtcacgattttgcacctttgttgtttttattttgttttattttttcctgttaaacattgtagaagaaacagataatgtctctaaggaccaaaagagaagtgcagaacttgagtcaaaccagatcacactgaattctgaatttgcattaggaagtgacagttgtgtcagaaaggctcacagtagtagcataggtcaagtgtgacaggtgattacagcaagtcctggagttacctgtgttgaatccactatagtggtgtaactggggattgggggggtagagtgctgccttagtgagaccctggcttcatccatagtacatatgaaagaagcacaattgatggtgagccaggtgccagctctttgcaaggctgaagcccagaagcctaagtcagtctgtgtagcagagtgagaccctgtctctaaataaatgaataatatgaaaagtctccaagttcatgttggctctcaaagaacaagaagctggcaagtccccattctcctttagaggatatttgggagccagtgtggtttcatgtgtgaggagatgaagcatgtaccctgtttttccagcctgaacttggtaggaccaagatacgtaagaggagagcctatcagcatggaccacagaatctgtgtttatttctagagacacagttttgctgtatagaccagagtagtctcacacacataattctcaggccttagcctccccattgcaggggtgatagtcatgtgtcactatatcagcttttgaggaactctgtacacaagtgaccagtgtgtcattagatagtattgtggagagaattggacttgcatattaggtagccttagtggccagcatagtagtagcagttgtcacattcactaattactatgaacgtacagaactgagtttagttttacagctgcagaatgagtttttgctgttttagtttctttttgagacaaggtttctctgtgtagccctggctgtcctggaacatgctctgtagatgaggctcaaactcagatctgcatgcttctctttccatagtgctgggattaaaggcatgtgtcactactgccaggctgagaatgagttattagaggtgcggacagccatattcaagggccaccagtgtttagaggtggggcagggtagtgatatgaacttccagaaggatgtacactggccattttgtctaaagatcagtttataggaaattgggttcatatcatgttaactgcagaaacctcactcatagaacccaaccatggcaaacaaatgacttaattcaggggtgatggatagagagggagggatgagctgttaagtggtttaaagtgtcaccaagggcatgttcaaagcattggcttcacaaaggccagtatgggcatgggagacatgaggccagggacctggggagtgcacatgtcccatcatggcatcactactactttgtgggtgtgcttggaattttccataacaaaaatttatggtcagcaagatggctcaataggtaaaagcacttcaccagaagcaccagatcttagagattccacctgcaggcagtgaaccactgaaccttaaacctcagcagcaaatgctgggctttggctgagtatgtgttattatagtatcttcactgtctctcaagagttgattctttgtctttaaaattattagtgctgaaaaggccacctttgaaactttcataaatgtttgtttgtttttgagacagggtttctctgtgtagccctggctgtcctggaactcactctgtagacctggctggcttcgaactcagaaatccacctgcctctgcctcccaagtgctgagattaaaggcatgtgctgggctggtgagatggcttagcgggtaagagcactgactgctcttccaaaggtcctgagttcaaatcccagcaaccatatggtggctcacaaccacccgtaatgagatctgacgccttcttctggtgcatctgaagccagctacagtgtacttacatataataataagtttttgggccggagcgagcagagttgaccagagtgagcaggacagaggtcttaaaaattcaattcctaacaaccacatgaaggctcacaaccatctatctgtacagctacagtgtactcacatacataaaataaataaatcttaaaaaaaaaagggcatgtgccaccacttgctggcacttttagacacttttgaaaggtttcagacactttgaaactccgttctaatcctaagccaagaaataatttaatgatttttttttttttgaaattcaagtcagcaactcaaatagcagtagttttgttccccccctccccctaagggtttctctgtgtctcccttgtttgtggtcctggaactaactcactgtgtagaccaggctacccttgaactctgagatctgcctgcctctgcctctcaagtgctggaactaaagctggccaccacggcccagctgtctgtctgtctgtaagtaagtaagccagagtcccattaaataatgctaactggcctagaacacactgtgtagttgaggctggcctcaaactctgttagatccacctcccttttctagagtgctaggatcaaaaagcatgcccttccacaccaaagcccttgtttagtttttgaaagaggatcttaaatggtggcctaggaactgcagggaggaccgcagccttcctcaacacagctgctctagagttccttgtcccatgcatgttcctggccacactgccaggtattggcacctttgctctggggcaaggctcataatcccatttgtgtggtgaactactgtagcagtctggattccctgatagctgctattgctggcatggtagctgcaggctctggagctgtacttcatcaaacatctttccttaagaaccagctcttgttattgatcaccaggctcaaatagctgcaacccttagaacttgggtatctcctcccctgcccccacaacaaaactaagcaagacaaaacaaaacaccaaccaggtaatcgccacccatgcaagaaaaattgacattttcaccatttcagagtgtggtatctgttggcattcagtatactcaaggtatggcacagttctccctaattccaaaacattttgaaatcttatcttttatgtatatgtgtgtatgtgggtgcttgagggcattgatcccctgaagcaggagttggcaggcagttgtgagctctctctggtcctcttactagtcatttgaatgggtgtaagaaatgtctattaaagtgttttcctggtgtgtgtgtgtgtgtgtgtgtgtgtgtgtgtgtgtgtgtgtgtgtgtgtgtgtttcattttgtattttgagacagggattctcttgtgtaaccttggctatcttggaactcactttgtagttcctcgaactcagagatctacctggcttgtcctttgatttttgaattgacatggccctcaaggagaagattttgtgtgtctgtttcactgtattgatactttgtttgttatttgagagaaggactcactttgtagccctatgtgtcctgggattcattctgtagatgaggctggtcttgaacttactgagatcacctacatctgcctcccaagctggtattaaagctgtgctccagtggctggtagtaccgattgatgcatacagttttaattttgatgtagtctaaattatcttttagtgtgtgtgcatgctctggtgtgtgtacatgtgtacctagaggtcagaggataacctcagtattccttaggtgccctccacttatttgttgagaagaggtcttcactggccaagcaggccagactgtgcactcatgctattgccctagcactttgtaaagtatgcttcatgggtggcaaggtcaggacgtctccccagctacagattgctctatttgttgctgttggtagctttagataagatgtgtgagagcctattgccaactccaaggataggaagtctcacctgtggtttaagattctataaatttaattctttgatccatttttgagtatagtttctgttttatttttttgtaactgtctcactctgtagccccagctggatttgaacttacacagttctcctttttcatcctccagttgtcaggaatacctactattcccagttaggtttggtttttctagatgccttgctctgctgttcaggctgcttgtggaagactgggctgcagaagtgctgctttgcctgctggcttctgtttgctttccatcgctgtcttctttcttgacatgaagattcttctggcttattttacaggaagggagtgagggaaagcaagtgtactctagttttttgtctcttttgtgctgagcgttgttcctgtactgggccctggtaacacatggaataaagaggtgtgtcctgtctcaggaaaggagtcggaatatataaacagatgaacataaagatagaagttgcaagtttcagctgacgcctagaggaagagtcctgtgggcagggagcagagccagccttccattaggatgagggagttgtgggtagtagggtgttagggtggcagaggccaccagaggctcatgacctcctctgtgacgcctcatgtgtcagctcagctctgtgtactggaggtgactgcagctataggtgcaagtgtgtgcaagggaactgtctgcccacagcaggaaagagttctaacctgattcttccttgttatgggctgtggaacctccctttttttccttagaagtgggcttcaaagcccctcctccctcccctgggccgcctcctgcagggaagagcaacaaccagcagcaatactgtggcaaagggtgcctatgtgaaagggatatgggatacatcttggtccctcaccttttactcagtgtgtctttatgggagatgttcatctgaacctttggggacattgtatgcaaaacaatttgtcctttccaggtaccagcgtggatgaatcaggttaggtcctacagagtgatctgcctgtaagggttatggactcttttcatgataaacttgtggtcttagtcttaagagatggctgtggcctgctaatctgtcactcatagtgataactcaaatctagagcttgggtcattacacagctcttagttttccttcacatggccacattgggcagcacattcctctccctgggctgaaggtcaacacagggcacaacttgaggtcaggtgtctatgtggggccactcctagctcacacaaacataatggggagactgaggactcttgagatgatagctggcatgttcactctttgtagaccttactccctgcctgcctcccttggggccctaatcaggtcagatacatggccatttcttgttgtctggctggatttaaggctgttcctagaaagggctgagaggccagggctatataaaaaaaggtgtccagtgagccaggttgatatgtggctgctgtctttttgaggtttgcagcacttagctcggtctaggggggcttctgtagcttcattgggggctgtggtgttttctggggatgacttgttcttctaaaaccgctttgttctttgccaaggctgtttatacatcgctgcatgtaagaacccatgcaatcccagcactcgagaggcagaggcaggtggatttctgagttcgaggccagcctggtctacaaagtgagctccaggacagccagagctataaagagaaaccctgtctcgaaaaaccaaaaaaaaaaaaaaaaaaaaaaaaaaagaacccatgcaaaggaatttgattctgtagtgctgaggaactcttgacctagcacaggatagatgagtgctgctatcaaacttcacttaggcctaaaattttacttaaatattgaaaatatacttgaatatcttaaaactacttataatttattttttactttaatctccttttctctgtttgtaatttttacttattttgagacagagagtctctatatagctctggctgtcctggaactctgtgtagttcaggttggcctgcctctgcttttgggtgctgagattgaagcatgcaacaccacacctggcctttaattttcttaaatacatcttaaggaaccttattttggaagcatcttttacgtatctcctaccttaataagattgtagaaaagtgtttatttgcaaaagcagacactggaaccttctatcctctctcctttttctcctactaagcaagtgattagttccttaggcccctcaacccttgaggtatttgtttccaggcaggttctctgtctgtagtcaagcctggacttaacatgcttagtgctgagatgattggtgccactatgcccaggtggttttctgtactcatgagacagctctgcatactgggggcttagagctgtctgttggtcaacattgccatagaagacagacctttacttagagaaatgggtcagaaatggaagcaggaggaggagctgatcaggttgtgtgtatgcatatgtgtgtgtttgtacatgttgtgaaaggctgctctgttttaagagtctatctccagacagtaggtgaaaacctcagaagtcccttgcctagtcttttagttctggagactcagcgtgtactggataaggtgccccacatggtttggaatggagtgctgttactcacctaggtctagggttcctgaggatggcagcagagctcacacccagtgtagatgtctttctgggacctctgtccttctctcgggacctttccaggaacagaagcgagtatggttccccatcctcatggatgtacacatggtccctccccaagctttagatgccccagagacctgttctggtttctgtagctccattctgccgcagaacctcaatgggccatagatttccacacacttggctgtagtgtgctcaggttctattttcccccaagttctttgctgagctttgcactaaaactgggttaaagtttcattctctgaaggagttgattttgtagcataccacttttttgtaaaatggggcctctttgcctttagatttccacatgtgtgaggaaaggcaaaagccaaccctgcagctagctgcttgcctactcattttagagactaaggcttggggcctggttttgagttgaaattgctggttgcatgtcttttctgaacctcccttcctctaagtagatgtgctctgggttgtgtttgggaaagcaggcctgctaactgctgtgttaagaagatactggaagctaggctggtatacctttgctcagtgtaaaaccagaaacactatgctagatggccttgaaggcgggtggcccatcatggtgcatagttttatttggtcacagccatgcccattggagtatgtacagtcaggaccggaggacagtcctcccacagacagcacatgattctatatcagaagtactagactacgcctacggtttttgagacgggaacttacttactatatggtcctggaagtcatggaattcaccctgtagttcagtttggtctcaaactcataacaagctttctgcctcagtcctttttcaggttgggatgataggctactggtaagcattttaaaactcattacttagcaacttgaatttttctccttcagtctgatgaatttttttccgtcagtctgttttcagtatcacttcatgtcttttccatatgctgatgaggcatgaatggggaaactgagcctgcacttgtcctttgcccaggatcatctttttgactcctaagttgaattagattcttttacttggcttcactgaggcagtatttaaaggttgaaacttgggctttcgagtctgaattcttccagaagagtccccaccactctgacatttggatgtgtggcaggaagtggcttgggcccacccaggcaagtctcagtgtctgttttggcttggagaaaacctgcctgtcccagcatagctgtcttctcccttatacctccccagctatttgggacttggctataagagcctggctgtgctatgtggttagagcagacatggcttctgggctccagttgctgatggggaatgacctggcctctatcttggaggacaactttgtggcgagaacctgcaggagccgggcagcagggcctccgtgctgtatggctgggctccatatcatcctggggcaatggcaccttggtattgtccttcagttgtcctgtccttgggcgggctgcttcagaaggcctgctttcttccagacaggaagtgagacaggaaatgatggccccttaaagccccagggcagatgctatcctcaaggagtggtccacagttgcaccaaactgtagtcttgacttttccatcccagtttcagaagagtctattgcttgagtagaaccaaataaaagtagagcagtccccccttcccccatccatgcttaggggagcttcagagcacacctaggagggaaatctgttcccacagcactgtctcgtcccttagtgccccactacctatcagccagatactgctttagagtgaggtggacctctgggatccgagtctagacccccatgcttccctggatcatcatgctcctatcacctcccccacaggccatctggactgtctccattaggcctgagtttcccacctggcctctgcttctctgcttgctctaaccactcagtcctgtcacctgacacccttggcctttttggtctttgcccagctgtgcattcctgagcaccgtgtaatccccagcccctaggacagcagctcctctggtagaggcccagggctgctttggattgagtgaaggagcaggaaatctcttctcttctcttctcttctcttctcttctcttctcttctcttctcttctcttctcttctcttctcttctcttctcttctcttctcttctcttctcttctcttccttctcttttttggttttgttttgttcttttgtttttttgagacagggtttctctgtatagccctggctgtcctggaactcactgtgtagaccaggctggcctctaactcagaaatccgcctgcctctgcctcccaagtgctggcattaaagccgtgcgccaacacgcccagctaggaaatgtttctctttaccttctctttccccctcttagcatccccttctttccctctcacagtgctaaggttcccccagttacaaacatcagctgtcggttttgtccgtgccacttattgccactcctccattcatgtctgcaatacacattgtgaagtcttactaattgaagttgagctgccacagtcagaaggacaccaaagtctaaaatgttaacatgctacttagcttcagcttggagaagctgttcgttcagtcagcctcctgtcccaggttctccctccagttgcattgtggtattttactgaaagaaggcagcatccaggtagcagttagtgatgtttgtactgccctagatatccaccgttggtgtaccacaaggactcaggccccttggtcccagtgctggcagaggcacctgtatacggttcttgttgagaaatcccagtagtagcctttagggccctactgaacattgttggggttgctgcacaggacaggtgtggggcccagcccatgatgttggggcttgctctaagcgtcctaaccccattccttggtaggtggatggctcttgtgacctttatatctcttaaaatgaccatcatttcctgtgttgctgccgtgtaggaagtggctgctgagacccatccccctgaacaggcctgtggtagctgttctggtgtggcagctttcttttcccctcctttggggattttgaaacccactcccatttacatgtgagtgatttaaaccctttctctgcctcttaggatgcttcctaagggaagctgctttcttcgtgcccacattgtgcttactgtacagtgcttatcagtgccggtcccaggaagaccttgttcctggtggccttgaggaagttgggactcttcttaccacagaatatcacactgggctggattggttactcctcagaggcacagctgtgggagctcaggctctagttgggagggtgtagcctactgggacttctgtctggtgctcaccccgccagctgtgcttgtctttctggaggtggggagccaaattccaggcatcccatttcttaccttcacccacacctacccttaggttggctcaaggttctgggccctgcttgagctctgagtaggtacctgtctccatgcaatgggcagctcctagggatatgaaaagcagttccctcaacccctggtagacctttgcttttccttaggccctttcacagcaacaaagaagtaaggctgtggtatggagaagatagatttcaggtagggtttctggtggattcagatgagctaggagaggctgaggtcaaggcctggtctttttgtgtatgaaagccctgccttactcctactgagttatgatggcggaacttgggagcagggccaggcctagagcttcattctattttgtttggttttcagggtctttttgtgtagcctggaactctgtggaccaggctggccttgaactcaaagagatccacttgcctctgcctctcaagtgctgggattaaagaaaggaagtatgcccccaccagtgagcttcgcttttgagaaccataatgcttgtgccccacccacccacccagttcccacatgcccttattgtcacaggttctgagctccccatctatatcctgtccaggcctggccgtgtttataccctgtctgaggatactgccaatctacttcctcttgttctagaactcagcagctctgcttcagggagtaccctgacaccccaggacagtggcttgtttgcttttgctggtaggcaaagcaggcagattgtcagcaagtgtgacagggtttgtggtcaggcttgttgaaggaagagcaaagccgtagtagactctccagtgctgttagagtggagggatatggtgggtgctccagtatctagggaagattgccagagtacaggttggggtggcaggagaaagttgggtggagatgaagcccactgaggtttgtgaccctatccccatctctacctttgatagagtcgtattaaggtcaaagcattaactttaacctaggtggtgatgaagaggaggctcttgggtccaaggtctatggaagaaggtgactggaccatggagatgaggttggactctggtctggccgtgggagtgcatccttgatatgatggaatatcccagcctcccagaaccttggaaggggtttctagaactggctttgtccagggcaggcctttcctaccatatttaccagtggaaaactgaggcacctggaaggaggtatccctccattaggatgcagaatcagagggctttcccatcaagcctgctggagatgtgagctgaggttctctgcagggctatctatactcaatgccagatgtctcagtggagctgtcccttggatcctgccagagcccagccagactttttttttttctcttccctttcccaagtgaactctgggttctctgactttccctaggctggtgtcctatagtgtttagtaagacctggcttctgagcggtccctttaagagggccttgtcccagactcagctgtggaatgccagtaagctgtcctcttgtctctgtgagggttaacaacacttcacttcagctgtgttgtctggaaccggttcagactggttctctggaaagtgctttgtctctctgactgcatcctgggaagggtcatgtggagcccagtgatgtcatgggatcaaaaactgactcagcgtttttctcccttttctttgaatcaagataaatgtgtgccacatgtacagggccatggtggtggcactttgggatggaccggtccatactgtgctcagagtgtatgtctgccagccaaaaagcttagcatgaccctcacttctggctccctggggggctcaggcacacagcacctgaggtcacctctatccaggtcctacacacaccattacaatacagatgccaggcccctggactggttttcagacccataataggcaccgttcttccacagaagggccctgtccagtaacagctgccactgcttttctcccacttggattccatggcttctcagagctggccacacccaagaggcctgtgggactccttcctgcccagccatcctaagggtgtgaggggcgtctatggccctgtctttgttgtcccttctctagttagctgcctctgaggaaaagaaaaccgcacttcaaactaaacttgtcagaaggggttcaaatgctatatcctccctttcgcatacagaatgagtgaagaagcatgccgaacccgcagtcagaagcgcacccttgaacctgacctaacggaggatgatgtggagaacaagaaaatgaaaatggagaaagggtcatcagagctgacagtggacggagacagcagggtgatgccagagccgagtgcaggctcagcccaggggttgctgaggacaacagaggccatgggcacaggatctggcgaggggctgttaggagacgggcctgtggacatgcgcacttcacacaggtgagtgagaaaagacaatgggctgggttggagcctagcagaggctggtacagggcaggatgtccctgagtcctaggctgggacactgtcagtggcaggttcatgggttcattggggaggaagtcccctgtatttatttagtgggtctgccatctcttggattgtgggaggactgaaacattcctttggtgggagtgcctcagggaggccaggctaccacactttgtgtcattcctcaaaggaggagcctccctattctgcctggcttctgttatctcttctgtgggtttctcctgtatatcactaattagttcaagggaactttcctgaaacccaggcttccttcttttggtttttttcaagacagggtttctcggtatagctctggctgtcctggaactcactttgtagaccaggctgtcctcaaaactcagaaatccgcctcccaagtgctgggattaaaggcgtgtgccaccaccggccggcccagaacccaggcttcttgacactcataggtaaaaggctaaaggaagtcagactcaacctttttctcccagcagctacattaccctttcttcagaacattctagaatggagcatttaccccagattctcactgaggactttccctgactccccttctgtccactgggatcctgtacctttggggtcctcatctacctcatgtgtatactcggtgaggtcggtccagcactagtggagtgcaggagggagctagttctccacttggtgcctgaagtgcacagcggtttcagtcttcaattttctgcaaaatctggtgttgggatcctgagggcttccagatttgccgctgtgccatagaatcctgaggacttgtgagttccttgtgaaactggaatatcccttttattgagaacattctgtgaacttgccattagaaaggcttctctcatctgggcacacgtggcaggatctgcccatcatcccaggaagcacagacaggaagctgaggagttcaaggtcattgtcagagagcgacatacggagttgcaggccagcctggagcacagaagaccctgtcttagtaaccatcctcttgctcactcagaaacttctctccctctctgactgctttctgctgtactaggggcgtattttagaataagtcacagtgataggctgaggctccttttcctccctcagactttgtgggtcctcagctcagtctttctggtgagacctctgataggagagctcctgaagcagatggggagggagttgttggttctttggggttatgccaggatgctccatgttttgcttattgtggcctgctcctttgtgaggtgggatggtgaagtccaaagttataagtgttaagatgtgaaagatccctcttttattgccaaaatccaggggtacaccagggctctgaacctctggggccctaccagagctgttggtttccaagctgtcctttagatgttttttcttgaagtttttactggtgacttcttacgacatacgtagtatttcaggataatctggggaacagatcacccggatatcctggattgagggctgcctagaaactagaggaccccccaccaccaccaccaccaccaccaccaccccccgggttctggctgcatgcaggtgtaagagtggaaaagaaaccaaaccctgaaggtcagtgggcagggtgagggctaggccacatgctgcagctctgcttgggcaaaacgtctcagccacatttcttcctggtgagatagtcactctgctttgcaggttgatgaagtgacaggaaggaagtgtgttcttggtggcaacctctgcagtatgggaacagccctgttttctatgtttggtcttccttgggtgtctggccaaggacacctttagggatctccctccagcatagtgtgtgcttctatgggtgtcagacaggagttgggttccaagcagattcatgtagtgagtgcattcacccagggtagtgagggttaaggtactgttgctttgagctcaccatagcaatttattagatgtatacagacaaggccttgcaggcttaatgccatatatttccttgttctaccaatatggcttttttgtaaacaatttttattagatattttcttcatttacatttcaaatgctatccctggtccactataccctcccccccacccagctccccaaccaacccactctgacttcctggccctggtgttcccttgtactggggcatataaagtttgtaagactgaggggtctctcttcccagtgatggctgaataggccatcttctgctacatatgcagctagagacacaagctctgggggtactggttagttcctattgttgttcttcctgtagggttgcagaccccttcagctccttaggtactttctctagctcctccattggggctatgtgctcatagaggctgaaagtcagcctcggttggctaccattcatcagaaactgtccatcttatttcttaaaacagggtctcttactgatctgagacttggcaagttggtcaggctcttgagacagtgagccccagtgaccccatctttatacttgtccccagtcctcagagtataggtgccaccaggtcctgctgtttcctcagtgcctgctttgtagctttcaaaagtgtgtgccttcaggtcagcccagactaagaggggagcatggataatgctctggtgttattgccgtttccctccatttcctgattggacagcttagcgtccaacagatgagctttgtttgtttgtggattttatgtatctgtctgttctctttgatgcctggcttttattccacaacaaatgtgtgagattcatatgcactgtttcatagtacagacagtgccctctgtccctgtgggtttttgcactaatgttttcaacaatcacaaatcagaaataatgagtgtgctgggctggatgcaatagtagtaatatattccttactgctatgacaaaatatctgataaaacctgcttaaggagaaaagaaaagtttagttggttaatggtttaaggatataatccactgtatcatggaagcctgcacatgtgacgacatctggtcaatagtggttttgtgatcagaaagcagagaataatgaataataaagctggtacacaaattgtctcttcctttatttagcattggacccattccgtggtatggtgcttttactcacagtcttccctccccttactgacaggctggaggtatgtcttttaggtgatttctaaattcatcaagctaaaagctaagattaaccattcacaggtagagcatagagccctgaggttaatgcctactaccaaaaagaaagggtgtacaatttgtacctatactaagcatgtgtggactttctatttgctagttcctaagcagtgtgatgtgcctgcttacagcattcatgctaagtcaggtgtttgaatgatgcatagcacagcatgtagagattctgtgtaaacagtcgtgctgcgttataccagaagttgggaacctctcagatctggggtggggaggagacctggtaccaaggattttggatgtatgcttctggaatttcttttctctttatgtatgtatgtatgtatgtatgtatgtatgtatgtatgtatgtatgtatgtatgtatatgtggtggtatggtacccaagaaggggtgtcatctcactgaagctggagtttcaggcagttgtgagctgcttgatgtcagtactggcaatcaaactttggttctctgcaagagtagtgtgtgcttttaattgctgaaccatttttccatactgcttctagaattgtatttggttctttcaaaactggcacctggtggtgcacaccgtttttgtttttgtttttgttttgtgtgtgtgttttgttttgttttgttttgttttggtttttggtttttcgagacagggtttctctgtataacctggctgtcctggaacttactttgtagtccaggctggccttgaactcagaaatccgcctgcctctgcctcccaagtgctgtaattaaaggtgtgcgccaccaccacccggtggcagtggtgcacacctttaattacagttcttgggagacaaagacaggtgggtctctgaattggcggacagccagggctacacaaagaaagcttattttggaaaaaacaacaacaacaaaaaacttctctttttttttttttttaaataaagatttatttattatatgtaagtacactgtagctgtcttcggacacaccagaataaggcgtcagatctcgttacggatggttgtgagccaccatgtggttgctgggatttgaactccggacctttggaagagcagtcaggtactcttacccactgagccatctcaccagcccaaaacttctctttttgctcatgctcccactgtgggcattttgaagccttgggtaggctctgagggtggcagagacttgggattcccctttgaggatgtagctgggatgaaatcaaaatctctgagtgacgtctctgtgaatgtttgtatgacagaaataacagagtggtcagggctctatgaccatctctttcactcgaaagtttttctgtcagtctcctaatgtgtattttatatttggaataattgagtttggagggcaacttgggattatgttgaagaaagcatcaaatcttcccaaaaggcagtgggtggcactagctgcactcatcaggacgcagaagccttccagggctcacagcatctttcctggaagcactctccagagaactttctgtgagagaacagtgaggtgtggtgtgtgacctaggactgctaaacaatctcccattccttcttgaggctagaacaaaaaccagcagtttatttggtgtgtggggcacaaggcagcgctctgcccatcatggacttgttctgttaacttgaaaagttagtgaccacagttgttaccccagcacttaggatggccaagagctaaggcatggcctgggataatatagtgatacctgtcttggacaaggaaataactaaaatatgaagaagcaatacagaattaacgtgatcaattgaaaatgttaacacaaaacaagacaaagttgcagagggggggaaaaacaagaaagaaggcaggtgtatccacagagcggtcagtggcaggggttggacataaaagttctgatcagtcacccagtggtctaagtgacagtcaatagattcgaggaaagataggtaccaaccaaacaacagagccctgggtgacttcatgaacgttgaagtggaaagagtcatctcatagcatctgagccaagctagagagggcctttggaggtggggatgtcactgtagttttggctggcctaaggcacacagattttcctctgcttccctggtgctacatcatgtttgtacatgatggaggagaggcacatggaacatctagaaatagatgatctagctgggcgtggtggcgcatgcctttaatcccagcacttgggaggcagaggcaggtggatctctgagttcgaggccagcctggtctacaaagtgagttccaggacagccagagctagctacacagagaaaccctgtctcgaaaaaccaaaaaagaaaaaaaagaaagaaagaaagaaatagnnnnnnnnnnnnnnnnnnnntcttaggctggtaaaaggctcagtaaaaaaatgtacttgctgctcaagccaaccgagtttagtccacagaacccatataggtggaaggagagacccagctccataaagctgttttctgcccttcatagcacactgttccatgtgcctctcctccatcatgtacaaacatgatagtaattttattttttattagatattttctttatttacgtttcaaatgttatcccctttcctagtttcccctccgaaaatcccctcccccttccaccatccccttgatagtaattttaaatagaaggttacgggtgtcatggtttactcttggtaatcggcaatgcagttagacacaatcaacaaggttacagagaatatagccactgttgatccacttggcctggttgataatctgcatagcacaatatagctcaaatattcattgaacatttctgggttctctgtagtaaagacagctgataatgttaagtgtcgggcaaggatgtgtagaaaccagagcctcccatgcccctggtcagagtataaagtaacataagtagacattttcctctagacatgaaaccatgagaaatggaattatttcccccatacagtgaagattggggcttgccactagatctgataacctgagtttgagccccaggatccatgtgatagaaggagagagaaaaccatcttcagtctcacatgttgttctctcacttctgtgtgcaggctgtgacacatgtgtacccctgtatacacaaaacaaatactaattcaaaaaatgtcattaagatgtggaaaggaagatatgtgaggctctgtgagccaggtggtagagaacagtgcaaggggacttcatgcttcttttattgttgaaatagagtgccatgtagttaggcaaactccttatcctcctccttccatctcctgagtatgtgcatgtccacattggatagtactattaatgtctcctccatgtagatgatttaggaagcaaatgggatagtgttccacctatactgcaaaagaaatgtggaggagggacgcgctacagtatggctaccataccagatatatggtatctatatgatgatgcattactagaaacaatccatagaggttaccccaggttgtgtgtcttgttctgcaaggtcccttagccttgagattgtgaacagtgctgccccaccccagcctggacctctggtcaaggctgagctggtacaaacagaagaagctgcttggtaccttatgccccactcctagtctggatctctgctgagctccagctggccttgcactcctctttaacctcctcccctcctcggtgctgggatgagagatgtgccaccatgcaggacttactcgaaccttttctgtggcatcatcttggactactgcagggtgagtctaatatactgtgttgttcttgaggaggaaggaagtactgacagtgtggcttacttgaagtgaatgacactgctctccagcgagactgtctccaagcccttaccctgagaggagactgtaggtctgtggccttcacgtccaacttggagtccagtgtctctttccaacctgtcccaggttggtgctggcacctgcccttcaggagtttgtcttctcctccctcttccctttgtgtcagttgccatgtacaggctgtggctaccctcccttcacccaacatggggtctcgacttttggaaagttgaggttgattttaccagctctggtgtccatgtcctccatgacaggaccactgaaaaaggactgaagtgtcacatatatagtatgtacacattacacaactaccaatgctcctgtcttccacaaaagccaagtagctgtgacagtgcagagagcgggctgtgtgggtggccttgcttcctctgcagagatgggggacaggcctcaaaatgtattcatggtgccaaagccagcaggtcaggtcttcactgaaatgcccttcaccagtggctgcttaggacagggtgtaaaggcaaatctggaataaccaccccataaagagaggccatgccagtcagtgatctacacggcacaatgaggaaagtacccagcatagtacatgttttaatcccagcactcaggaagcaagggcagatggatctcagagaccagcatggtctacagagagtgtacctggacagtacagtgagataccccccacacacacccacacacgtgtatatatgagggaaagcaaaagtctaggtagctggggaatggttccgtggggaataagtcgcttgctgtgtaagcttgagggccagagtttgatttcctcagaccctacataatagtgcctgcctggaaccctggctcttaggaagcagagatgggatcagcaggctgactagattagactagcctgaattggcagatatgggtctcagcaagacatccatcctgtcttagtgcatcaggtggaaaatttatcaaggaaaatgccctaagtcaactctaggtctccacacacctcagatgtatgtatatgattgatgtgtttccacacacagatgcatgtacaccacaggtaaatatacacaaaaaggaaaggcttacttatgctctagggatgtggttgtgttctgggacccaatgcctttggacctatggtaaagccacacatcatggtgggagtgtaggtagagaaagctacccagcttctgatggctggggataggagaaatgattcccatagtcatctctgtgggcacgtgacacatggcttatataggcagatcctcctctagttctactctgtaatgagttctgacaggcacatacacttgaagcagcaaggttaaaaaaaagtattacccagaaccttcttccagagagccttccacaatgctccatacactctctacccttctgttttctttgctcaccatggtttgtggtattgagttctgtgggcccattcttctgtacagctctgatttgggctgaatactgctgtgcctatcatgtgatcatctggacagtgaccagccttgcccttgctccatgcccagcagttaatggcaggctcctgaggtctgtgcagattcagttatgtgaaagaagctgagggctttctccttaaaatgtcaaaattgtttttagtgtatgtggcagtttatttcttatgactctgtcactaggtccctggcctacatctgggttaggtcctcctccatcacctttcccttctaatggaagcacaaggctaagtccgtgagagaaaagttgactgcccaccactttggggtaaccacacacaagccaaacatggggacaggttggatattatcttccctagcatgcaaactaggccccctagcagtctgctggaatttgtcttgaataaacacccgtgtcccagctgttagggtaatatctcaagacagtctcagcatgtgcatatgtgacccttcacttcacatctcttacagtccctaccagaaagcctgtccttgggctactgtgtggcttgaagaacaggcaatgcctaaagctcagagagaaatccctaggccactttgtctcttagctattattctactctgggaactctacatatatgcccttaatactagttctggtgctctcttgccccagttgccatctcttaacttgtgggcctttctatctctgactcactttctacctcttttcactatgggctgcttgcctgttgcctttattacatctttctccataggtcactaagatgagaggatctgcctgtatactgggttgtctaggacactatgatgttgtgtttcaatatcctataagtgacccagcccaatctgggccttttctcttattacatcagctttgagtagtggggggaccccagaattcccaggcagggcctactccacagtaaggtttcagagctgctgtgagtgctggttatgaagcccctcactttcctctgttaggacagtggcccaggctgacctcagactggcagtccttccacctcagtctcccagatgttgggggtaatatgtgagtggttatgcggctagctgtttctaattcgtttgccattcctgctcaaattgggtcatatgttgctaggcttcctggagctgctgctttgtcagccacagtggtaggtaactaaaatatgcagggatacagggagctcactgctaactcacttttaagacttttatattcataggcatttgcttgcatgtatatatgtacaccacaattttcctagtgcccagggaggccagcagagggtgttagatcacctggaaccaaaggtgtacaggtggccccatctgttgctttttaattggtactgttttctggccctgtgatctggaaggaatcctgcctcctgtcctgtggaggaacagagtgaagaagggacttgggtatatagagcaggtagaagtaagagtgaatactaagacttttagaatgtttgatcaccccatgtgctccagcaggagtcacaccagaaggtagactgttgtagcctatgaagagggctcattaggaaaagaatggcaggcttcgtgggaagggagtctgggttgtactttgtactgatactgtcaagaatataagtccaagaacctaatagtgagtcagtctgtggtgacgggctgtcagggaagaagagctgacagccctggtatgatgtctcagttctgtgctgtgtcagatgcttcatgactctcctcagagccctgttgtctctgtctcatcatagagtaagacttttcacagtgctgaagggacaaaaccttgggagtatgtgaatttctgaaaatgagagactgggaaggggatgtgcccctagatgcctgagggagaaagggcacaaagccaagagagatgtctgcgtttcctgtggctaagattcaggcaggtaccatggtgacatagaaggtcctgtactccctcagaagttggagaccgtgaaggtgctttctgatggctggagagacaggagacctctcagtaattgtatgttcatattcttagatcccaaacaatgggatgacttttttgtgtgtgtgcctagttctacacttggaacacttggtaggtttggatagaaactacgctaattaatctcttagtgttctggtttagtataagtgctcccaaagcaagtacttattttgttttttagagacaaggtttgcagtagctcagtcctcacaatgtagctgaggagccttgaacttatgatctgcttctacctatagagtgctgggatggcaagcccatgtcactacaccagcatatagctcaaccttttttttttttttaatttaaagtctcactatgtagccatggctggccttgaactcatagagatcttccttcttctgcctcctgagtaatgggtttaaaagtgtgtgccacattgtctggcagtggcttgtatttggaaacacagttttgatagacaggggaaaagttaccaaaggtcataatgtattgggaagacaagacttgggaatccacccagtgacccagtccccagggaagagaaactttttttgaagctggagagatgaccttgacaggtaagagctcttccagagcacccatggtagacagcgccagggatctgatagctctaggcaactttggatttgtggaatatgactgggtatctaacgtggtagaaaatttgaaaataattatttattttattaaaggtaactgtaataggcctctgaagtagcagcatgcatacatacatggtatttttatgctctttagatggctgatgggctatgtctcaatatacccctattaagttgaaagttgcaaggctggggtttaattcagtggtgtacttgcctagcaaattcttatctgctaaggaaatatgagggccacatccccgtctaacactgtctctttcttatcaacttgagggaactggtgtcaatgttgccagtggtccatgacttgtcaagagctgacaatgtatgggactagactttttctgtgcaaatgttctttgctgagcaactctgagcctccctcatcctttggcaatggcagtctcatctccagggagcccaagttatctgcagggcttggctgagtgaccctgggaagtgtcttcctttgcacgctagaaggaatggcaaactgtggatggcatgggtggccagagttcctactgatggcttctgttgtgtttctgatgctaagaacacaggacttagctttcctaaggtaccagctgttcttgggtaggtgacaggcccattggcatgagcacacattggctgaggcatgtacacacacgcgtgcgcgcgcacacacacacacacacaccagctgctcttctctgtcctaatctagaaggaggtagcaatgcaggctgggtaccgcttagctttgctgttctgtggtgcagtcccacaggccacatgcagcttctccctgtgtctcactatgctggagctccagaacaacagtcagatgtgaactctctgggaatgtgatgacatcactttcagaaatcccaccccagctgcttacctctgcggtagaaaggcagagcgtgttctgcatcccagctttccagccagaggccttcaggttctagctgggaggcatatgataggtgctgagcaagacctgttgacaaggagcagataggctctacagcacctgtttgtgtctacttatcccaagacaggactgccgctcttctcacaagtgtccctaaaggagaaaacatcagagggcagcaggctcttatgggggtgggtgtccatgtgagtttgctcttgtgcccagatggtatgaaaggtcattgaaaaatgtcacctggggctgccagatcagtccgatgggaactagtgcccactattaaagctccctagtaggtgctgtgcatggtggtgcacaccttaatcccagcacttgggaggtagaggcagatagatattttgagttcaaggctaacctggtctaatagcaagttccaggacatccagggctatacagagaaattcagcttcaaaaatgggggctctctaataggactttttagaagtaggtctgggtttgggtgagcagtggtacaatgaatgggacagatgtgctcttttagttagaggcactaaaggtggtgcctgaagtagaggtgccctctggtctcccatgaaccctccagggacagcttctttatcctgctgttctggtaatctaggctcagccagccctacctatagacagaaggctgcctctactgccctgtgtggggagctgtcaagtgtgggtttggcacactggtacaagcttctcctgcctgcctccttgctccctgctttgtcccagtaagcatcctgtctgttgggacagtctaaggaaggaggcataggcctagtgtaatattttgaagcagtgctgggctaatgcttcactgtatagtgattctgcagcttagctgctcccatgtcagctgtcctggcaatgctggctccatcagtcacatgcagtggctgacaatggccaaacccatctctgtcccctcaagaaagagagcttatccctacagccatgtggcccagagcagttagactcctcctggtgcctgtgctcgggaaacatttaagttgctgttacctggcccatgggttcaacagtgggaaaccctttcatggtttggtgtttaacagctacccacatgtgcaacctgaatggacagggcagaggtagaccccattcttcacaccctttgccagcctggaaggctgaacaggcatctcccctacactgtagtagggctcaggaatctcccctctaatccagatcaaggctggagacgctcctggagttctaaccctgccccatgcttcaggctcctgggtctctgagtcaggggagtctggcattgtccaacacttctgtctatgccctccaggacgctggtttgcctactctggagaggcagccactgtggcctggtagcagacatgccaatctcaagagttagctttgcacagacagccccatcttgtcaaggtgaaacaggtcctttagggccagcaaagctgtcccacggccttggggaagtagagctcctactctgcttggtgctgacacatctgagcattcaaaactgagaaacatgggtaaaagagtgcccctcaggaggcgggaggcagcataactgtggagtccctcactttgtggagcactttcaacagcctaagtcactaacccacagctttgtgggtgcatctcctctccacaggaacaggctaatgcctataggagcgtcactatggggacgggcctctagctttgtgtagaagccccatagcctcttccacccaagtcagttcagtcatagctgaccttaaggttggggtgcttgggaatacttattctagagcagcatggccctggcactgaggcaccgtgatccttctgggtgcccttattgggagctgaggctgcaccacacccatgtgagagggatagggaggatggggaatccctcctgtgagttagagacacacaagctgtgtagacaaggaagtcaggcctattcaagagggtagggtagctatgcttgtccatcctgtcccatctgtctgtctgttttcacacagacatgtactaggtgagaaaggcgacatctgaaagcagtcccttaggaaacaaaggggccctgcaggtctgatgtcctcctttggcttatgtgccatggggctaatgaatgccaacacaggccattccaaaggtcagaggtccattgaagggtgatagagacagatcatggctagccagggcttggtggacagacttgtgagtcaagctagtctgtgttgtggtgcaaggtttgggtgcagaagagtaggtgtataggccatgacagccaagctggccctgaggaggacttggtcctcagttgatgtaggtgttcttcctcctccgatcagattgaagagacatggataggatccaagcacctcctctgatgtgggctatcccagtgctcagccccttctccaggacacagcacacattcctggtaggagacagcttttggtgctaatggccagactggctggcttctggagatttttactggtgatgtgaagctacttcatcactgtgtgttttcaacatagacaggtaggacaggttcacacagcatccagaaaaggcagttgtccctgccggcctggccgtgctccagagctctccatgtcactcttcattttactcttaagcctatgggtttcatgaaaggctccctctgaaattgtgcctgtgattgatccatgtattctggttcctaagttaaaagctatctagaaaagtgcagagaatcttgaaggtatttctgttaaaagctgagcttcggaaagcctttcagtttggaagggagaggggcttgtggtttcctctgttttttgtaggagatgaccacaggcgactggatgcctggaggctgcacagaaaggggaaagtggagcctccattttctgacagcacctgaacccttacctctcttctcaaaatgaaggccgtgtgtcacaaaccggttagaactgcccgttgccatggttttcacgttggaaggcacagttaaagggtcacatgaccagagagggaaatgcctttgtcacatgactttttggtggcctgattagcatagaggaagttcactccgggcaggctggctgctgctgggatgctgagtgatactgatagcagtgacatcatctctgaaattgattagttggggcccaggatggggtcagagagcaacagtggtcagggctgtcttccaaggaagcctaagtccaggatggtctctgccccagcagtgccctcattcctcacagacatctcaaattttattagacgactcacctcagaaagataggaaagagataaactccacagttgggtgtcctttggtctgcctagaaagccagtcctagactgtaactctgtcataggtgcctcttaagcccagctgttaattcacttgggcacccccctgggccagtaccacagccacggcactgggctgctcctctgctacacaatatacagttggtggcatgcacagtcagtggacctggaattgaagctgtctgatcaccttgaaacctgacctcgggtgagggccggtgggaatgttggaggagagattgacttggagtgtttgaagagacccgagggagacagatgcccagggtctctttttttaagctgttttgttgtttgtttgtttgtttgtttttaaagattcatgtatttgtatattatttatttttgtacaacagtgctttgcctgtatgtacgtctctgtgagggtgtcagataccctggaactgaaaattcagaaacttatgagctgctgtgtgggtgctgagaattgagccctggtcctctggaagagtagccagtgcttttaactgtggagccatctcactagctctctcaatttttttaaataatttgtttgttttgtgtgcattgttattttgcctgcttgtgtgtctgagtgaggctgtccaaatccctggaatttaagttacagtagtgagctgtcttgtgggttctgagatttaaacctatgttgtcttaatcacagagccatttctccagcccttccagggtctcttttaaatgactggtttctgggctgccgaagcctgactctcaagaacctccaggcttaagccttcaggctgtggccagtgtgcacgtatagctgtcatgtgggaatcaggaagccagccagatgctggctggtcagcctctgcccaccatgccactcttcttgagaatacagctggcaggaaccagtggtggggacccaaagagtcttcacctagtgactcacctcaccctgctcaaacccaaaccacagagacagatctgcactgtgacttccacctaactttatcctgtgtcacagtgccatctagtggacatattctgagctgctttccacaagcaagttggtacttgcttgggtgctgggatacacaccaaggggcagtttagattgtccactgtgggcagtactttttctaggacttagtgctcctcccacctccttcctgtgttacagcaacagagcacactggctttaaggatttagaagcaacagatgtgtatgccctctgatacccttcacaaagagggaggtctaattttggggtgctcctgtgtgggttaactgatgtaggctatattatagccactggtctttagccagtgtgggaagagtggtcagtgttgtggacctgtgcatctgacagtgtgtaccacccctgctacaactgagctcctagggagactggctgtttgctcacagggaaaagtgaacttcctacaccacaggatgtgtgttagaaggttggtcacagtggtgagtgttccatgatgtaacttcttctgagacttgagtgtgcagggttgagggcagagccatcacactctgtagacctgagcatgaagtcagtgagagtggttcttttgagtttgaaaacttgtagccactgcagccacttatgtgtgtcctaggtaggacaatgcagcagatggccccaggtccccttgtgaggtagagagcaaaagctaacagtacatcattgtgctttttggtcttctggggggctgtatgggactgggttaagagaggggtgggcttcccattgggtagttcccaatgtgagaccttggctttggagtgctcacgtccatcctacccagcactcaggagctgagatagcagaccaagatctgaagctctgtttacttgtgacagagctctggggtcgagtagcactttctgaagcatccatgctacacctgagtactcagagatggagcacaccatctggtgtgtatggccctaatgaccagtgatgatacccatggtgcccacggtggcaagaggaggcacctaggggtgattgggcatctggggtagtctggcctgcctggtactctgccctgctaagcacctgcttatctccatttgacagtgacatgaagtctgagaagagacctccctcgcctgatgtgattgtgctctctgacagtgagcagccatcgagcccaagggtgaatggcctgaccacagtagccttgaaagacaccagcactgaggcgctcttggtgagccttggcagagcctggaagccccaccaccccaccttgcagagcttctgctgaggctttccccaattttgtgcttttgctctcctagaaaagcagcccagaagaacgagagcggatgatcaagcagctgaaggaggagctgaggctagaggaagcaaaactggtcttgttgaagaagctgcggcagagtcagatacagaaggaagccaccgcacagaaggtgcctgtgctctactgccccagaccccagagaggctggcccagggcagaggctcgacccacgggcgggatggcaggcagtgtatggcgttagggagcaagcagaaagtaattcggggtgggggggtgcgtgcgtgcgtgcgtgtaactttacacaccaactccttttgatgtctcttgctatcttatagcctacagcttcctcagggagcactgtgaccacccctcccccactcgtgcggggtacccagaacattcctgctggcaagacctcacttcaggttcgtgcgcccttctgcttgttgccctgcaccacctccgtttatagtcaggctccaaacactgcctgctcctcccaagtaaagaagcatggggctcccacagactaaaggaccagagtgtcacatgcgccccaaattacaccaccaaactaggctactatgaatgtcgcagactggtcagtggtgattgagcagtaagactgaaagattggctagagtgggtcgctccgctcaggcctctgcccacagactctggggcctctgtcacactctcgtattaccttcctctgagttcccatggctcctgctagagtaatgtatacaaaaaataggcatttcagtttatcttgggtttgtaattagttaaaacaaaaaccaacctaggtctgtggcttcattggttgaatgtgtgcctcatgttacagagccctaaggtgaagccagatgctcacacctttaatcctagcacacaggaggcaaaggcaggtggatggatctcttgtcagtttgttctactgcgttctagaacagctgaagctgttacacagagaaaccctgtctcaaaaaagaaaaagaaaaaagaaaaaacaaattaaagaaagctggcagttccatccctattaccacatatattaagatgttgccttaagcctctcatctcagcactggagaggtaaaggctgaaggaattctaagaggaaaggaatactcacataaacctgggcatcggtgtctttgacagacctcctccactcgaatacccggcagcatcatcccaccaccactggtccgaggtgggcagcaggtgtctgccaaactgggaccacaggccagctctcaagtagtcatgccaccgcttgtcaggggggcccaggtgagtcaggtatgtgagctgtatgtatgctggggcagggccaagtgcccaccccttctgtggtctgccagggttggtttgtcttagtggcatttcttgtcccctatctcctcccagcagattcacaacatcagacagcattcctctacggggccaccacccctcctcctggccccccgtgcctcagtgcccagcatgcagattcagggacagaggatcatccagcagggacttatccgtgtcgccaatgtccccaacaccagtctgcttgtcaacatccctcaggtgaggccagaaactaggtgggaggttgagatggaatcaggtcctggtaggtctcatagtaccattgtgtgtactgtagataggctggaggggttggggtggagttctaggtatggaaatcacaaacagattagcctttagcacttagggagcttttgagaaagtcgggactccttcagggtgcagcaggctttgaagaaaaaaactgaggcaaagaatgggaagaccactagagggacaccagagccttttgaagcctgccagccttccgaaaagccaccgctgtagcacctccccccaactcctgctgacttgttcagctcctctgggcaggctgggaggacagcatgtcacagattctcctacagcacagttggctattcttagctgtgtgtccctccacctctatacagagcctctgaggtggggagggtctgtccccacccctgggtagcaggatgggaagaaaagggcagttttgtctgacagatgaaattacccagtccacaggccttttgctgacgagccgagttcttttcttccttgcttgtcacgttctgccctcctcagccctccttagataagacaaggctggattctggacagctctgacaaagggtgtttgcctgtgttagggtccatctctagtgcacaaacaatggctgtctctgccacctccttggaagggtgtgtgtcccagctgaaacaaagggcctagagaatgggcaacacctcatagcatccttgtcccacttgctatgttcagtatgctaccagggtgctctgctagtgatggagccagggccctggctagtcacatgctggagacctgagctaggtatcttgctgagtgaggccttagcatccagagccccacagagtatagtattttggggtcttccagggaaagcgtgtacagtcctcttagtatcttctggaaatcattgacactctaggagcccagaccactgacatggtcagccttggtttcaggaatgcaggggtagggtgggtggagactaccctaatggggataagaagctggtatggtgagggacaaacaagagctgcatttccctgggaacccgttgcatactcagaacttctagaagcagcactccgggtatggaccacactgcagcctcccagcttgctcttgctggacttctggacatccagactgggtgcacagaacctgagtggcctggctatgtcctgggcttggctttatctttgtctctttgtccctgtggccatggacctatgtgaggacaggccacttagattacttttgtttcttggattgtttttgagagtgtcttaggatttagcccaggctggaactccagatctgctcgagctgggattataggagtggacagccacacccaactcagactttaatcctgtaaggactccagtgtgcatctggcatggagcctgccttaggtggcactctcagcctcacctacttgtcttccacagcctactgcagcctccatgaaggggacagcagttgcttctgctcaggcaaattccactcccaccagtgtggcttctgtggttgcatctgctgagtctccagctagccgacaggcggctgccaagctagcactgcgcaagcagctggagaagacactgctggagatccccccacccaagccccctgccccagagatgaacttcttgcccagtgctgccaataatgagtttatctacctggtcggcctggaggaggtggtgcagaacctgctggagacacaaggtgagtggatgtcctcaccttgcactgcagtgtctggggagacagtgtagagtttcctccagttctgctgtgtgggtaggggtgaggcagagcatctgcaggggactgacccctgcatgagtgtgggttacatgaaggcaaagcttggaccaggtttttttactgtcgctggggatgctgtggatctgcaggaccccattgaagcagcagtagagggggaagtgtatggatgacccaattggcaccacacaggccaagcatcttggtgttgaactggcaagcaggttagtggtggtcagcctcacctccttcctcaagtgcctgtgtcagataccaagagcagaaaagggggtgaatatgactggatccagggagccttggtccttagtgctccctcttctgacatgggtatgagggacagagtgtgcacacagaaggacttgtgtgttcacggcagagtacaaagaggaaagtgttggtaggggcatgcacatctctgcccatttgcttcttggggctgggttgttaagtgtatgctccagacttcagaatccccaagccccacacctagtagcaccctagagtgctggtggcccacagtctctgagggttgcatatacctcagaaactttccgcagcactccttaagcacagagttgctaaacaacccactctgtggaatgatgttagtaacctacatctcttggggttccagaagagacttaagtgtgtgttgctgggaagcctgggtgctggcattctgtagtagggtgacattgagcaaagaactgcaagagagaggtacccactcatgaagagtaccaagttcatgcaggtgctcgattctctcccaacagggggactgtggaatgccagcagtcagctctgacaccctgtcattggggtcaggcttcctctcctgttgctctgtaccagggcaggtccagtcaggtccataccctcattcagtgttgatgtgcacaggtacagggctgtggacagctagtgccactcctgtgtcttacctctgggcccaggcctaattctactgccagtcatatgatgatgaagttgcttgtctgtcatatctccagaagagagaatgaatacccacatgcccacagtcccttgcagggtaactgacatctttggcacaggtgttagttaggatacttgtcatgtctttgaagagtcccaggaacactcagactgtggcctccgtgtacctgtgagaggtacccactgcccacagtcgttggaagttactttgacaaaggcacctcatctattgcagcaggcaggatttctgccactgcagcagctgctgtgttatcccgggagccctacatgtgtgtgcagtgtaagacagacttcacatgccgctggcgagagaagggtggagccgttatgtgtgagaactgcatgacatccaaccaaaagaaggcactcaaggtggagcacaccagtcgcctgaaggccgcctttgtgaaggctctacagcaagagcaggagatggagcagcgcctgctgcagcagggtgtgggtactgccagcatcaaggctgagcctgcagctccacatcccacgctgaagcaggtgagagctggagcccttgccgtccctaggtgacaggatgttccggaggcgtccccttcaacccacccgcctggtggttaactgcaggctaaattgcacttaatgctggcatttggcagcgaaaacactaatttgcagtttctttagattttgtagctttcacccccagtgcactggcaagtacttctgtgtaaaatgactggctgctgcgaactttgctgggcgtcagcaggagcaccctggctagctggaggaaggagtgggtgtgaggcccgttctccagagcctgcttgtccttgcaccaagtggactggacccacccacctttttttcttccttttcttttttgagacagcatctccccatgtagctccagctgtcctggaactcaccatgtagaccaggctggcatagaactcacagagacccaggtgcctctgcctatcgagtgcttggattaaggtgtccaccaccatgcccagtgtgtgttcctttttgtggtttctgtctgctcacacattgtacctcaccaaaaacatcccctccccctcccccccatctgcagtatctggaaccagcgggtgttggcactgctgccatggccaggcctgatagggtaccctcagccagtttggatgagtgtcaggcaccttgctaatgtacctttcaatcccatttgtgtaggtcataaagccccgacgtaagttggcgttccgctcaggagaggcccgtgtctggaataacgggtcctcactacaggtcagaacccggccagggcctcatacgaccgcagccccagctcttgatgtgctcgtgctcttacatgctctcatgcagctctcctcctcctcgtcctcctctcacagcctcccctgactgtctcctcctctccctctttctctgtcccctagtgtaactcacatggccgttttgactttggactcttaaggacccaagtgggtgggaagaggtcagccagacaaggagaggctgctcgaagtaacctgcccaacccctgcccaccataagcctggtcctctttgacttctgtaggcttccagccagctgtcccgaggctcagccacagcacctcgtggtgttctgcacactttcagccagtcacccaaactgcagaatgcagcctcagctacggccctggtaagcaggactggcagacattccgagagagtcgtgggcaccggcaagggcaccgcctccaactggaaaaagacgcctctgagcacaggtacacctctgcctctatgggaacccactgccactaggccacctttccttgtttgtaaggtgcagtccaacacacacaacccagcagcctcctccttactcttattttttccttgagacagggtttctctgtgtagctagccctggctgtcctggaactcactttgtagaccaggctggcctcgaactcagaaatctgcctgcctctgcctctgtgctgggattaaaggcgtgcgccaccactcccggctcctccttacttataagggcattttcaaaggtaatacagagagcctgcatcttgtccccttcttgagagcatatcctcttgctcccatcctgaggcaagtgacactttacctccagtagaagggcttggctcatgacttccttttatctgcctcaccctcccctaacctcacccacctcaaccctttcaagcaattagtggtgctttgctgccctgctctagagattagtgacaccagcagccagcctttgcccatctctcttccactgccttctccctgtgtggaccagagcagaaccatgaacccagagaagggtggactgtgcagggtgctcatggagcagcaatgccacccttggaacatagaaatctctgttgggctcagccttccttgcagcctgtaggaagaacagctggcagtgagtgccaggaaagcctcagaaggcagtgtggtgggagcggtgtacagggatctgggcacccctggcatattcacaacacagccaggaagtagtgggcttgcctgagctggacatgatggcacgcgcctgtagtctgaggaggagagcagactcagtgatactcacatgtgcctgctacttgggaagctgagacaggaggatcactttagcccaagagtttgagacaagcctgggcaatgtaggaattgctatttaactagagagaggagttcaaggtagagcttaagtgagcaagtatttgcttgtgggtataaggccctaggatccagcccagaggcaggcagatctaataggaggccagcctggcctctgtagtgggcctcaaaatccaagcaggggaagggctagagagaaggcttagtggttaagaacatagggtagtctgcacgacctgtttgattcctagcacctacattgggtggctcacaacaacctataactgcagtttcagggaatccaacctccaatactggctcagatggtacctacagacattgtacatacacatgattaaaaatacacctttaaaaacaaacaatcataagtagagcaaggtagcatcccatagtcccaggttctaggaagactgacacaggaacgatctcttgagggtaggtagtagtgtgaggccagcctggccagcacatatgtatgtgccttcccctcacatctgtatgctatcagatatgagggagagtttctttccatagtcccactgctccatgaagctccattgcactgatgcaaatcccttgtttgggtttactgatctcttagcactgagcccaaccactgatccatacttaggtcacctctgtgggatctgggattgatggcagtgtggaggttctgtgggtcatggtcctgctcatgggtccactgaggatgtgctgagataggtgagtctaggctgtatccatccagggccttgcctggctgatttgccactacccatcactgctctgttgcaggtgggaccctcgccttcgtcagcccaagcttggcagtacacaagacctcctcggctgtggatcgacagcgagaatacctcctggacatgattcctccacgctccatcccccaatcagccacatggaaatagtgggagccggcccagccgaggacaggccctcttctctcccaaggcccttggtctaggacacacagactgcctcctagcgagttgcctgagacagctcaggccttggctgttgccttgctttggccaggagagtgtgccaccatggtgcccaggatcagaatgagggacctcccaatgggccttctctttcctttttgcctttagtttgcccgacaccagcagaaactcggaccttggggccagctctgcctggccagcgtgggtgggagctcaccctggacactgtgacacacccgggccaggctggcaccgggggctcccgaagttgagccgggatttcgttttcttttggcttttcccatcttagctccccagtctctgcctcttcatggccatctataggttgaagtttgggttttattgggtttttttttgttttgttttgttttttttgtttttgtttttttataatcacctcataatgatgatggaattaaaagtgaactgcatagacccagagtcactgtcatacacagtgcacttgggcaggctctaaccccagaggatgctcggagtggcaccagagatggcaggtaccaccctgactctagttgtctgttgctgctcactgcaacccctggcttccacacttagaacgaattgcagcccatattctgtctgaaatctagaggctccagagagatgctgagtccactgtgctggagccagagctggttgctgggttactttttgtggtttattttattaaaaatttctatcctttttctcttttgatggacacaatctcatgattcccatgcctgccaagaggcatccatccaggtagggcccagccacagcccttaggtctggagtcagcagagcttactccctctcaatccacagggacgcctgaaagggcccagtctacttctgttttgtttccttctccccccattctcttaacaattggttccatggtgaaaggcagaagtagctgtgtgtccagcacgcacggggcggccttctgctcatgtgattggtcgccgtcgtttccccatccaaccctggtttcccttgacacagtacagttagggactttaatttaaacccttgttctgcggaccaccgccctctgcagacacgccccctgcctcctcctaataaaggctcatttaactccatgctcacctgtgtggaaatcctccatctttagaaatcatttggacatgtgggagttgagagttttggaaaacacttttgttgtgtgatacccaagttgctcagtgcttttgagtgtgtcacttcccagggtggttttgggggaattaacagaaattgaagttttttaaaaggggggtttttacaccaaaaataaaaaaaaagagagagagaatatatgcaagcatttcttagtccttgagtatttttgtgcctggcaagtcagttcctgttctccacccttcctaagtggcaatgacatagaccaaaagtcttctggctccttggaacggcagcaccggggtggcctctcagccagaagtcctcattcctatgcagtcactgatcagaccatgtcacctagaactggatgaagacctccacttgagttgagggtctgaccaagagggttcggttgtcctggtgcatccagacttccaagtcttgtgacttctcccatacacctgtcatccaacccttgtaggcccagtttatgcacctcacaagggacagacctccctggctgtggttcatacttgccaggatgacaagctgtggtaaaggtctctctaaggagggctagagtgaggtgccttagcttactgaccttacttgaaagtgctgcctgttcttctgcaccacactggcctatgcagcaagccctcaacatgataaggactggggactgaagggccatgtttgggggtgtacagagctgccacccccaccaatgctggctttatccctatcctgaatggattaaatcctgggttccttgagacccccctagagatagattagcctctgcttcttgagtgctgggattaatggcttgtacctccacacctggcttaaaactttttaaaaaatattaatggcatggtaactttcctgtctatacttgggaggtgaagatggaggtgatggttcctacttcattgatttcccagaggcaacacaatcagtggctctggtcatcaaggtcacaggtaacaccatttcctctactaactgctagggacaggtttgaagggaggagccaagcacagaacacatctgtatttgtcgaaccagaccttttgacagatgtgtgacctaggtttggttgtttgggacagtggtcctatgaacagcctccagacctgatcacggtcttccccaccaccccagggaagccaaagcttgccccaggcggtagtaagggttgtaagtgctggctgtaacaaacacctccatgtacagcctccagacctgatcacggtcttccccaccaccccagggaagccaaagcttgccccaggcagtagtaagggttgtaagtgctggctgtaacaaacacctccatgctctgaggcagcctgagtgctgctgaggggaagggtggtcctcgccatgagtcatgtcagcctgaagaccttggattgtttccaaaaagtggtcagttttctgatcctcaatgtgtaagttacactagtgcagggtatggggattggggcagttgctacttgtatttattgtgactgaacctttgacagtacatgtttttttaaagtgccaccaaactggaatagatgttccaataaatgagctgaaattggtagtcactgtgtcatggggaagtctgaaaccctgaaggacaataaagaaatggaccaaatgtcaactgtattgttctttaatttctttggaccccggtattttcttccctgcacagatagctgtgggctccatacagaatcaggtctgcatcccttgagatgctcagttccatatttgattttgttttgaggcaggatcttagtagctcaggctgcaggaatgacaggcatccagcaccattggaaatattttacttaaaagaagctggtgactggagagatgtctctgtggccaaaagtgctggctgctcttccagaggacacgggatctattcctagcactaacagcagcttacaaccatatgtaactccagtctctggcctccacaggcactgtacacacagtgcacagacatgcaaacaaagcactcaataaaattaagccaggactgatgatgtcacctttaacccagcactcaggaagcagaggtatgtgagtttaaggctaacctagtctacaaagtgatttccgaaacagggctacttacactgtctcaataaaaaagcagtgtgtatcggtatcttgcctgcatgtgccagtgccacctctgagacaccctcagcacatactgccatggtgtggggaggagggggttgaatactgagtcagaggctctagctgtgcttcatatttgtcatcccaacacccaaaggactgaggcaaagatggtgatttcagagctgtgaaacagtgttctgttcagcaagggccttcccttagcctggctgacctggaattccagccctgctacctctgcctcttgaatgctgtgattatagttgcacccaaaatgtgtgtagtgccacatttctcgttttaaaaagttactaaattgatgccagatgtagtggcacacacctttaatcccagtgctcaggaggcagaggcaggtggagctctgggagttcatggctcatctggtctacatagctccaggccacctaggctgacacagaccaagtcaaaaataggatctcactgtgtagttctggctagtctggaactttatgtagaccagactagcctctaaatttaggtatctgcctgcgtcatggctgggattactactgggtagactaccacgcccagcttaactttaaaaaaaaaaaatttatgtatgtgagtatgctgtagttgtacagatggttgtgagccttcatgtggttgttgggaattggatttttgggatctttgctcgatccagttggccccactgtctccagtcaactccacttgctcacagttgtgaaccaccatgtgagtgttagaactgaactcagctcctctgtaagagcagccagtgcctttatctactgagccttgtcagacccagcctttttaagattttaatttttatttgtgtgcataggtctgtgtgtaaatgtatgctaagtgtgtgtggtacctgtggggacaaaagacggtgacacattccctggagctggagtgacaggctattgtgaactgttcaacatggatgttggaactgaattctggccttctggaaaaaatagttctctttactgaactatttctctctctttctctctctctctctctctctctctctctctctctctctctctctctctctctctctctctctctctctcctctctcctctctacacacacacacacacacacactgcatacattttaattctgttgttgagacagtgtattacatgtaaccctggctgggctggagccaatggctgctccctgcagtgtacctcacctctgcaaggcacagagccagtggaggtttttcctgcttcaagctgcatccacactgatgcccaggacccagcacttttaagcatttctccaggattctgcccttgtgagtcaggcagtctcagtggccccaagaccaaccataggctatgggctcgagcagcgttttaagctgagaaacaggaatcattaattctgttccctaggacctgctacctctgaagtaaacctcacaatgtgcatggggggtggggggagttggggaagggcagggctgtgtaaaagctgtcagctgacacctagatcggcaaaaaaaaaaaaaaaaaaaaaaaaaaaaaagcagctaggtgtggtggtgctcacttttaatcccagcactcaggaggcagaggcacgtggagtttggagccagcctggtctacatagtcccaggatagccagagctatattatcttgaaaacaaaaccaaacaacaacaacaaaaacccatagacagacagagaagaaaaatgggtaactggtcttggtgcatacctggtgcatactgcccaagaggcaagaggattgccccatttttctatttgggttacatgtgagtagtctatgcctacatagcaaaacctgtctctacaacaagcctggcctgtggctcagtggtgcaacccatgcctagaatgcccctagaatgcccagtgaggggcggggggttgggggggctggctggctcagagagtaaggttctcgattctacctccaacactaggaagaagggcaatgggaagtgggtggtgtagtcaacttgtgtactggaatctcaaaagacaatatagaaatacaaaccctgagtctactgagcccccgccttcccaagccctacttctcaggtgcggaacacaaagcacagcctgtatccattggctccctctgcccactgccaggggagtgggtttttttctcgactctggcatactccagctagccccagactttaggcctctcccctcttatagcctcagtctccccatctgccaatgccgcagttagggcccagcatgaggaaagttttcacattcaaaaactccagggcaccagaaacctgtggagtagaggggagctggggctgaggccagcttgagtctgtctctggataccaccgcccacgggagttcctcacaacgtacaattatccccacatctcggctcttcttttacttggcttgcacttgcatccttgttgaaggcaaggatggttgaagcttctcaaaatcccaatatctggttcaagacatgcagaactggactgcacaccttggaaagtggaggcaggagaatccaagttacaagccagcctaggctgcatagtgaggtatttgatctaactttgacacacaaaatcaccaccaccaccaccaacaacaaatcaagagatcatcagtagatgggtctggtttttccctgtaaacttttcccatagggaaaacaaccatcaccaaggactcccggcttccagagacctgagtacaatccacacctgtctctgcacaactgacacctatgtgggtgtcacatctgtaaatgctgttccagccaacaggcagtcccgctgatcccaattcaagtatcatcagatcctggcggatgactatagaacttttaggaatttatccagtttagggacgtgaagaatcaggatttgaatctccctactccggtttttaggtctaaaggtagaatttccacatactcgcctttctctaagttgccgaaaacttcccaccccctgctcagtgacaaggttccaccgctaaccccagttgcaaggaagagcgaatttattgcaggttccaacctggaacttagcgtgcacggctggcccacggtttctctgtagcatggcaacccaccgtgcaacagctcattctgcgcaggcgcaatgcttctctctcttctctttgcgcccctcccggggccttctcgccagaaatcgaggatgcgcatgcgctctccagcaatcagtttgtgcaggaggaatcagaacccaacagcaggcctcagagggccgccgccgtgggggaaggggaagggacaggacgcgtgcgcagtggcgcgcggcgacttcgcgggtttcccgaagctcgcccttcgcgcgtgcgccgccctggctctgtgcctggtgcggcgggaacagcgagaaccccggctcctagccggagtccccggcccgcagccagccattgcgcgccacctggcccgccgagggccgggcagacgggctgaactgtagcagctcggcgatcaaggatttgcatcgttccgacagttcgaggccgtcagggtagagcacgccgcgcttctggcgccggggtaggccagcaatgtccgagtcgtcgaagggcatgcacccggtgaccatgacgtagagcacaacgcccaggctccacacgtcgtatttcttagggtcgtaggggatgcccaggagcacctcaggtgacgcatacgcggccgagccgcagtaggtggtgctcaggtctgggtagccgtgcgcctggcggccgaaaccgaaatccgtgatcttgacgcggcgctcgtcagggcttagcagcacgttttcgcacttgaggtcgcggtgcaccaggtggtggtcgtgcaggtagcgcacggcgcccgcgatctgcgagaagagttcgcgcgcctgcgaccccgggatgcgcccgttgcgctgcactgcctgcagcaggtcggtggctgctgcctccatcacgatgtacagcttcccattgcacacttcgatgaactcgaaaacgtgtacgatgtgcgggtgccgtactccccgcaggatggacagctctcgaggcaggaacttgttgacgaagtccggaggcgctcgccggcggtccaccaccttgatggccaccgtccctttatacttcttggaggtggccactttcaccttggagtagctgccctcacctatcgtgcggcccagcttatagccaagttcgctcaggagtttgtcgcccgacatggtggcgcccggggcgcgcggggagcaggaggcggctgctgtcggggggcggccggactccaatctcgggcctaacccatggtgcttggcacctgcacccccgtgcccccatgtgcccactcccaaggccctacagccgcgatgacttttattgcccgggtaacaatttctgccttgtgaagtgactgcgggcgtcactcggccttggggcggggaccctccctcccccgccccgcgggctccctaaacccttcttaggctttgtgactcaatcgcccttaatggtcagttcctcgtgagaagtcactggcgaggagactgcccactgatgtggaacaggacaagtccctccctgaagtgatggtgctcaggtgggtgggaaccagcctgttgcctcgagcctggctaccatggctcacgaaagaaagtaggtgaactcccaagatttttagtgcaagaaacacgcccgagagagctctagatgcagaccacagttactccctgcctagggccagagggaggagggactgacttccggatcgcagcaaggctagcgtaacgcttccaaattaaagggaacctcctgggtgacggaacttccgccacactcaaaatggtggtcgcgcgttgcctcacttccgctggtggccggaagttgcgggtcctgcaagtatggcggcgtcgaaggtgaagcaggacatgcccccgccagggggctacggccccatcgactacaagcggaacctgccccgccggggactgtcgggtcagtgtctcagtgtcgtcctgttcgtcgcagaccaggcttttgttatgcggttagacgagagagggcagcctgcgggcttcagagtgcacagtgtgagcggaggctgagttggaatcttggttttctagtgcagcatcccggaagccagaatgttcatgtcccctagtttccagctggcttccacgggcctggaaactaagcctgcgagaagcactaacctggagtttggaggcttttgttttgttttaggctggcctcaaactccgtagcagagactgatctagaactcctgatctcttgccttcacttccgaaggctatgctcataggtatgcaccgttatacgtattttttttttaatgtttttaaatttttttttttttttttttttttttttttttttgcagatagggacttactatatagcccaggctggcctcaaactcgtggcgaccctgcctttgccaatggattgctgggatgacagacaggtccacccaaggcaagatgtgtgttgattgtaacatagcatagaaggctagtcttaaactctagcctccctagtgctggttcctcttctggcattctctgcccacccccagcccccacccccaccggctttcgtggagcccaggccagcctgaaattatgaacaccccaactctatgccttcatagtaccaggatgacaggcatgtgcccaccaggctgtgtttttaagtttttaaaagtgttttaagtaacatttagaattttattatcgatttcaacaggaaaagaatatgaagaaagttaaagtccccactgtcagtgctcagagttacagaaatacagtagttagcaactggggcccaattggtagagtgcctgcctagcctttcaaagccctaggtcgcacccctggcactgcataaacaggacttggtggtgcacacccatcatctcagcattttggatgctgaagcaaaacggattgatggttagggtcatcctgggctacatagatcaacctggactacatgatcccatctcaccctagaagaagagagagatgggcttagggactgtaagatggcacagtggttaagggcattgatgctcttccaaaggacctgagtttgctaactccaccttctacaaattcagatttttagattttaattcatcagactttaatgtgcatattatagaaactgtgcctcaactaagcaaacaaaatgttctggtcctgtgtgatggctcacctgtgattctagacatgagaagcaaagatgggtcacaacaagttcaaggctagcctaggctatgtggagagtgtttggttctggattatatagagaagagcctcttggtgaagggcagcccagaccctgggctagatagttgagagttgtgggcaagatgtgccaggtacagactgagggatgctgggagaacctggaggccaggtcacgctgctttggtatgtaaaatatgaacctctgtcccttgttccagggtccaaatccaaatgtcaagttccagccagccaggaacatattgtgagaaactggttttaaaacccaaaaactagccaggcagtgatggtacaaacctttaatcccagcactggggaggcagaggcaggcggatttctgagttcaaggccagtctggtctacagagtgagctccaggacagccagggctacacaaagaaaccctgtctggaaaaaccaaaaaaagaaaggaaaaaaaaggaatatttatctattttatatatatatatgagtacactgtagttgtcttcagacacaccaaaagagggcattggattctattacagatggttgtgagccaccatgtggttactgggaattgaactcaggacctctggaagagcagccagtgctcttaacctctgagccacctctccagccccctccaggccttttgagacacagatggcagactagaataccctccccattcccagggcctcacctgctgttctgacagtgaggcagatcctctgtccacttctccctcctgtctcttccttttttcttttttcttacattttgtgtgtgacttagtacagatgtgaatgcgcctcttttgcacataaagggtagaggacaacttgaggaatgtgcttccttctgccccatgggtcttagggattcagcccttttactcatcttgccagcctctatctttattctttcttccttaaacatttaaaaactgtatggttctgatttcttgcatctatgcatgtatactgcacgcatgactggtacctgtgcgaaccacaagaggtcatcagattccctggaactgaagttatgtgagttgccatgtaggtgctgcaaactgagcctatgtcttctgcaagaacagcaagtgcccgcccacgcccacccccaccttgccacaccccaatatagccctggctattctggaactcatgggatcaaaggcatgtgccaccctgcctggctcccccccccccccccgccctactttttagtatttattattgtgcttgaatgtctgtggggagcgtgggaatgtggaggtcagagaacagctttgcagagtcagttttcttctgtctttctgtgggttccattctgcagtgagtgtttaccagctgaaccatttttgccagcctctctctttcagctttctctgaagtgtggcccacttaggcctgcacttagactgagctagtggtctcctcaagtcagggtggcttacttatttatttgtttattggttttttgagacaggatttttctgtgtagccctagctgtcctagaactcactctgtagaccaggctgggcaccaaactcggagatttgcctgcctctgcctcctgtgtgctgggattaaaggtgtgcgccactgcccagcatattatgtttgtcttcctgcatttatttagagacaaggtttcattgtagcccttagtagaccaggctggcctcaaactcacagagatctgcctgtctctgtctcccaactgctgggattgaagaagagccccagcacacatggataagactgaagtgtctgtatgtgcacgggaatgcaggtgcttatggaggctggaggaaggcatcaaattccctggagttggggtttaagtggctgtaaggcacccattgtagtttggggcacagaactctgtccctacacttaacctcagagccacgactccagctctgcggaagttttcttgtgtagtcacgggtggcctttgtcctgagttccagcctagctaactgcacatggctggttctttcccaaagagcttccagtctagctgatggactcattgtgtcagcattcctacctgtgcctctgctcctggtcgccaggaactgctgtagcctggggaagtgaggaggagcctccctgtgagcagacctcaaactggcgtctcccagactggtttcggacaggcctgtgttctgtgcctccctcagcttcaccagcaccctggtgttctgcaccaggcagccctttcattgttgttgtttgggggtttgaaacagtctcactgtgtagctccaggctgggcaggaacttacattgtagcccaggttggcattgaactcagagattcctgtgnnnnnnnnnnnnnnnnnnnngggg

SEQ ID NO: 2085 - DNA, 4379 bp, Mus musculus
ccctcgtggggtgccgatcttgagtgccccggccagacttcattggcctgcggcgccgccactcggagagacgtgcatcaacccggaagtgtgagaggcaaaatctgcctagcaaccggggaagccgggctgtgaagcgggcaatttcagtgagagaaggagcggtgagaccgagcggcggctctgagcgcgccgcggcagctccttccgcccggggtcagcgccccggcgcgcgcacgcgcaccctcgctgcctgagcgcgccccgcgccgcccgagggagccgtcgccgtgggacgcgaccagaccggacccgagcgctctgcctgaggttggcctggggcccagctgccgatcgcgcggagccgagcaacttcggttggccagcacattgagccagcacatccacataagttgccttttgacagaactgtggccatggcagcatggtaggatccgtgtcccggaccctgaggccagaatgagtgaagaagcatgccgaacccgcagtcagaagcgcacccttgaacctgacctaacggaggatgatgtggagaacaagaaaatgaaaatggagaaagggtcatcagagctgacagtggacggagacagcagggtgatgccagagccgagtgcaggctcagcccaggggttgctgaggacaacagaggccatgggcacaggatctggcgaggggctgttaggagacgggcctgtggacatgcgcacttcacacagtgacatgaagtctgagaagagacctccctcgcctgatgtgattgtgctctctgacagtgagcagccatcgagcccaagggtgaatggcctgaccacagtagccttgaaagacaccagcactgaggcgctcttgaaaagcagcccagaagaacgagagcggatgatcaagcagctgaaggaggagctgaggctagaggaagcaaaactggtcttgttgaagaagctgcggcagagtcagatacagaaggaagccaccgcacagaagcctacagcttcctcagggagcactgtgaccacccctcccccactcgtgcggggtacccagaacattcctgctggcaagacctcacttcagacctcctccactcgaatacccggcagcatcatcccaccaccactggtccgaggtgggcagcaggtgtctgccaaactgggaccacaggccagctctcaagtagtcatgccaccgcttgtcaggggggcccaggtgagtcagcagattcacaacatcagacagcattcctctacggggccaccacccctcctcctggccccccgtgcctcagtgcccagcatgcagattcagggacagaggatcatccagcagggacttatccgtgtcgccaatgtccccaacaccagtctgcttgtcaacatccctcagcctactgcagcctccatgaaggggacagcagttgcttctgctcaggcaaattccactcccaccagtgtggcttctgtggttgcatctgctgagtctccagctagccgacaggcggctgccaagctagcactgcgcaagcagctggagaagacactgctggagatccccccacccaagccccctgccccagagatgaacttcttgcccagtgctgccaataatgagtttatctacctggtcggcctggaggaggtggtgcagaacctgctggagacacaagcaggcaggatttctgccactgcagcagctgctgtgttatcccgggagccctacatgtgtgtgcagtgtaagacagacttcacatgccgctggcgagagaagggtggagccgttatgtgtgagaactgcatgacatccaaccaaaagaaggcactcaaggtggagcacaccagtcgcctgaaggccgcctttgtgaaggctctacagcaagagcaggagatggagcagcgcctgctgcagcagggtgtgggtactgccagcatcaaggctgagcctgcagctccacatcccacgctgaagcaggtcataaagccccgacgtaagttggcgttccgctcaggagaggcccgtgtctggaataacgggtcctcactacaggcttccagccagctgtcccgaggctcagccacagcacctcgtggtgttctgcacactttcagccagtcacccaaactgcagaatgcagcctcagctacggccctggtaagcaggactggcagacattccgagagagtcgtgggcaccggcaagggcaccgcctccaactggaaaaagacgcctctgagcacaggtgggaccctcgccttcgtcagcccaagcttggcagtacacaagacctcctcggctgtggatcgacagcgagaatacctcctggacatgattcctccacgctccatcccccaatcagccacatggaaatagtgggagccggcccagccgaggacaggccctcttctctcccaaggcccttggtctaggacacacagactgcctcctagcgagttgcctgagacagctcaggccttggctgttgccttgctttggccaggagagtgtgccaccatggtgcccaggatcagaatgagggacctcccaatgggccttctctttcctttttgcctttagtttgcccgacaccagcagaaactcggaccttggggccagctctgcctggccagcgtgggtgggagctcaccctggacactgtgacacacccgggccaggctggcaccgggggctcccgaagttgagccgggatttcgttttcttttggcttttcccatcttagctccccagtctctgcctcttcatggccatctataggttgaagtttgggttttattgggtttttttttgttttgttttgttttttttgtttttgtttttttataatcacctcataatgatgatggaattaaaagtgaactgcatagacccagagtcactgtcatacacagtgcacttgggcaggctctaaccccagaggatgctcggagtggcaccagagatggcaggtaccaccctgactctagttgtctgttgctgctcactgcaacccctggcttccacacttagaacgaattgcagcccatattctgtctgaaatctagaggctccagagagatgctgagtccactgtgctggagccagagctggttgctgggttactttttgtggtttattttattaaaaatttctatcctttttctcttttgatggacacaatctcatgattcccatgcctgccaagaggcatccatccaggtagggcccagccacagcccttaggtctggagtcagcagagcttactccctctcaatccacagggacgcctgaaagggcccagtctacttctgttttgtttccttctccccccattctcttaacaattggttccatggtgaaaggcagaagtagctgtgtgtccagcacgcacggggcggccttctgctcatgtgattggtcgccgtcgtttccccatccaaccctggtttcccttgacacagtacagttagggactttaatttaaacccttgttctgcggaccaccgccctctgcagacacgccccctgcctcctcctaataaaggctcatttaactccatgctcacctgtgtggaaatcctccatctttagaaatcatttggacatgtgggagttgagagttttggaaaacacttttgttgtgtgatacccaagttgctcagtgcttttgagtgtgtcacttcccagggtggttttgggggaattaacagaaattgaagttttttaaaaggggggtttttacaccaaaaataaaaaaaaagagagagagaatatatgcaagcatttcttagtccttgagtatttttgtgcctggcaagtcagttcctgttctccacccttcctaagtggcaatgacatagaccaaaagtcttctggctccttggaacggcagcaccggggtggcctctcagccagaagtcctcattcctatgcagtcactgatcagaccatgtcacctagaactggatgaagacctccacttgagttgagggtctgaccaagagggttcggttgtcctggtgcatccagacttccaagtcttgtgacttctcccatacacctgtcatccaacccttgtaggcccagtttatgcacctcacaagggacagacctccctggctgtggttcatacttgccaggatgacaagctgtggtaaaggtctctctaaggagggctagagtgaggtgccttagcttactgaccttacttgaaagtgctgcctgttcttctgcaccacactggcctatgcagcaagccctcaacatgataaggactggggactgaagggccatgtttgggggtgtacagagctgccacccccaccaatgctggctttatccctatcctgaatggattaaatcctgggttcct

SEQ ID NO: 2086 - protein, 727 aa, Mus musculus
DRAAALSAPRQLLPPGVSAPARARAPSLPERAPRRPREPSPWDAWDPSALPEVGLGPSCRSRGAEQLRLASTLSQHIHCLLTELWPWQHGRIRVPDPEARMSEEACRTRSQKRTLEPDLTEDDVENKKMKMEKGSSELTVDGDSRVMPEPSAGSAQGLLRTTEAMGTGSGEGLLGDGPVDMRTSHSDMKSEKRPPSPDVIVLSDSEQPSSPRVNGLTTVKDTSTEALLKSSPEERERMIKQLKEELRLEEAKLVLLKKLRQSQIQKEATAQKPTASSGSTVTTPPPLVRGTQNIPAGKTSLQTSSTRIPGSIIPPPLVRGGQQVSAKLGPQASSQVVMPPLVRGAQVSQQIHNIRQHSSTGPPPLLLAPRASVPSMQIQGQRIIQQGLIRVANVPNTSLLVNIPQPTAASMKGTAVASAQANSTPTSVASVVASAESPASRQAAAKLALRKQLEKTLLEIPPPKPPAPEMNFLPSAANNEFIYLVGLEEVVQNLLETQAGRISATAAAAVLSREPYMCVQCKTDFTCRWREKGGAVMCENCMTSNQKKALKVEHTSRLKAAFVKALQQEQEMEQRLLQQGVGTASIKAEPAAPHPTLKQVIKPRRKLAFRSGEARVWNNGSSLQASSQLSRGSATAPRGVLHTFSQSPKLQNAASATALVSRTGRHSVVGTGKGTNWKKTPLSTGGTLAFVSPSLAVHKTSSAVDRQREYLLDMIPPRSIPQSATWK

SEQ ID NO: 2087 - DNA, 4229 bp, Mus musculus
tccatgtgtgcggccgaggggcgcattatctggccggcggcgcgggcgggcggagcggcggagcgagcgccgcgggcccgggcggcccctcaggcgcagcgagcacgcgcggccggcgccccccgcccccagccctgtggacacgcgcgctgcccctgggcccggtcggcgcgcggccgggttggccagcacattgagccagcacatccacataagttgccttttgacagaactgtggccatggcagcatggtaggatccgtgtcccggaccctgaggccagaatgagtgaagaagcatgccgaacccgcagtcagaagcgcacccttgaacctgacctaacggaggatgatgtggagaacaagaaaatgaaaatggagaaagggtcatcagagctgacagtggacggagacagcagggtgatgccagagccgagtgcaggctcagcccaggggttgctgaggacaacagaggccatgggcacaggatctggcgaggggctgttaggagacgggcctgtggacatgcgcacttcacacagtgacatgaagtctgagaagagacctccctcgcctgatgtgattgtgctctctgacagtgagcagccatcgagcccaagggtgaatggcctgaccacagtagccttgaaagacaccagcactgaggcgctcttgaaaagcagcccagaagaacgagagcggatgatcaagcagctgaaggaggagctgaggctagaggaagcaaaactggtcttgttgaagaagctgcggcagagtcagatacagaaggaagccaccgcacagaagcctacagcttcctcagggagcactgtgaccacccctcccccactcgtgcggggtacccagaacattcctgctggcaagacctcacttcagacctcctccactcgaatacccggcagcatcatcccaccaccactggtccgaggtgggcagcaggtgtctgccaaactgggaccacaggccagctctcaagtagtcatgccaccgcttgtcaggggggcccagcagattcacaacatcagacagcattcctctacggggccaccacccctcctcctggccccccgtgcctcagtgcccagcatgcagattcagggacagaggatcatccagcagggacttatccgtgtcgccaatgtccccaacaccagtctgcttgtcaacatccctcagcctactgcagcctccatgaaggggacagcagttgcttctgctcaggcaaattccactcccaccagtgtggcttctgtggttgcatctgctgagtctccagctagccgacaggcggctgccaagctagcactgcgcaagcagctggagaagacactgctggagatccccccacccaagccccctgccccagagatgaacttcttgcccagtgctgccaataatgagtttatctacctggtcggcctggaggaggtggtgcagaacctgctggagacacaagcaggcaggatttctgccactgcagcagctgctgtgttatcccgggagccctacatgtgtgtgcagtgtaagacagacttcacatgccgctggcgagagaagggtggagccgttatgtgtgagaactgcatgacatccaaccaaaagaaggcactcaaggtggagcacaccagtcgcctgaaggccgcctttgtgaaggctctacagcaagagcaggagatggagcagcgcctgctgcagcagggtgtgggtactgccagcatcaaggctgagcctgcagctccacatcccacgctgaagcaggtcataaagccccgacgtaagttggcgttccgctcaggagaggcccgtgtctggaataacgggtcctcactacaggcttccagccagctgtcccgaggctcagccacagcacctcgtggtgttctgcacactttcagccagtcacccaaactgcagaatgcagcctcagctacggccctggtaagcaggactggcagacattccgagagagtcgtgggcaccggcaagggcaccgcctccaactggaaaaagacgcctctgagcacaggtgggaccctcgccttcgtcagcccaagcttggcagtacacaagacctcctcggctgtggatcgacagcgagaatacctcctggacatgattcctccacgctccatcccccaatcagccacatggaaatagtgggagccggcccagccgaggacaggccctcttctctcccaaggcccttggtctaggacacacagactgcctcctagcgagttgcctgagacagctcaggccttggctgttgccttgctttggccaggagagtgtgccaccatggtgcccaggatcagaatgagggacctcccaatgggccttctctttcctttttgcctttagtttgcccgacaccagcagaaactcggaccttggggccagctctgcctggccagcgtgggtgggagctcaccctggacactgtgacacacccgggccaggctggcaccgggggctcccgaagttgagccgggatttcgttttcttttggcttttcccatcttagctccccagtctctgcctcttcatggccatctataggttgaagtttgggttttattgggtttttttttgttttgttttgttttttttgtttttgtttttttataatcacctcataatgatgatggaattaaaagtgaactgcatagacccagagtcactgtcatacacagtgcacttgggcaggctctaaccccagaggatgctcggagtggcaccagagatggcaggtaccaccctgactctagttgtctgttgctgctcactgcaacccctggcttccacacttagaacgaattgcagcccatattctgtctgaaatctagaggctccagagagatgctgagtccactgtgctggagccagagctggttgctgggttactttttgtggtttattttattaaaaatttctatcctttttctcttttgatggacacaatctcatgattcccatgcctgccaagaggcatccatccaggtagggcccagccacagcccttaggtctggagtcagcagagcttactccctctcaatccacagggacgcctgaaagggcccagtctacttctgttttgtttccttctccccccattctcttaacaattggttccatggtgaaaggcagaagtagctgtgtgtccagcacgcacggggcggccttctgctcatgtgattggtcgccgtcgtttccccatccaaccctggtttcccttgacacagtacagttagggactttaatttaaacccttgttctgcggaccaccgccctctgcagacacgccccctgcctcctcctaataaaggctcatttaactccatgctcacctgtgtggaaatcctccatctttagaaatcatttggacatgtgggagttgagagttttggaaaacacttttgttgtgtgatacccaagttgctcagtgcttttgagtgtgtcacttcccagggtggttttgggggaattaacagaaattgaagttttttaaaaggggggtttttacaccaaaaataaaaaaaaagagagagagaatatatgcaagcatttcttagtccttgagtatttttgtgcctggcaagtcagttcctgttctccacccttcctaagtggcaatgacatagaccaaaagtcttctggctccttggaacggcagcaccggggtggcctctcagccagaagtcctcattcctatgcagtcactgatcagaccatgtcacctagaactggatgaagacctccacttgagttgagggtctgaccaagagggttcggttgtcctggtgcatccagacttccaagtcttgtgacttctcccatacacctgtcatccaacccttgtaggcccagtttatgcacctcacaagggacagacctccctggctgtggttcatacttgccaggatgacaagctgtggtaaaggtctctctaaggagggctagagtgaggtgccttagcttactgaccttacttgaaagtgctgcctgttcttctgcaccacactggcctatgcagcaagccctcaacatgataaggactggggactgaagggccatgtttgggggtgtacagagctgccacccccaccaatgctggctttatccctatcctgaatggattaaatcctgggttccttgagacccccctagagatagattagcctctgcttcttgagtgctgggattaatggc

SEQ ID NO: 2088 - protein, 714 aa, Mus musculus
PCVRPRGALSGRRRGRAERRSRGPGRPLRRSEHARPAPPAPSPVDTRAAPGPGRRAAGLASTLSQHIHCLLTELWPWQHGRIRVPDPEARMSEEACRTRSQKRTLEPDLTEDDVENKKMKMEKGSSELTVDGDSRVMPEPSAGSAQGLLRTTEAMGTGSGEGLLGDGPVDMRTSHSDMKSEKRPPSPDVIVLSDSEQPSSPRVNGLTTVKDTSTEALLKSSPEERERMIKQLKEELRLEEAKLVLLKKLRQSQIQKEATAQKPTASSGSTVTTPPPLVRGTQNIPAGKTSLQTSSTRIPGSIIPPPLVRGGQQVSAKLGPQASSQVVMPPLVRGAQQIHNIRQHSSTGPPPLLLAPRASVPSMQIQGQRIIQQGLIRVANVPNTSLLVNIPQPTAASMKGTAVASAQANSTPTSVASVVASAESPASRQAAAKLALRKQLEKTLLEIPPPKPPAPEMNFLPSAANNEFIYLVGLEEVVQNLLETQAGRISATAAAAVLSREPYMCVQCKTDFTCRWREKGGAVMCENCMTSNQKKALKVEHTSRLKAAFVKALQQEQEMEQRLLQQGVGTASIKAEPAAPHPTLKQVIKPRRKLAFRSGEARVWNNGSSLQASSQLSRGSATAPRGVLHTFSQSPKLQNAASATALVSRTGRHSVVGTGKGTNWKKTPLSTGGTLAFVSPSLAVHKTSSAVDRQREYLLDMIPPRSIPQSATWK

SEQ ID NO: 2089 - DNA, 142880 bp, Homo sapiens
actgctcccagagagtatctcattcttaacagttctttaactgttatcaaaatattggtctcaaagtactttaaggcaccgaaatgaggcacacataaacatatcatcaacacgctgaaatgtcatgaaaaaaattatactgagagacgtatataaaataagattttttttcttttctttttttttttttgagacagagtcttgctctgtagcccaggctggagtgcagtggcgcaatctcagctcactgcaagctccgcctctccggttcgcaccattctcctgcctcagcctctggagtagctgggactacaggcccccgccaccacgctctgctaactctttttttgtatttttagtagagatggggtttcaccgtgttagtcaggatggtctcgatctcctgacctcatgatccgcccgcctcagcctcccacagtgctgggattacaggcgtgagccaccgctcccgacccaagattatttttttaaactgaaaaaatgtatagtaattagccaataaaccagaatctgtaacattagatatatatatatatatatatatatttttttttttttctgaggcggagttttgctctgttgccaggctgcagtgcagtggtgcgatctcggctcacggcaacctctgcctcctggtttcaagtgattctcctgcctcagcctcccaagtagctgggactacaggcacgcgccaagaccagctacttttttttttttttgagacgaagttttgcgttttgctcttgttgcccaggctaggagtgcaatggcgtgatctccgctcattgcaacctctgcctcccgggttcaagcgattctcctgcctcagcctcccgtgtagctgggattataggcaagtgccaccatgcccggctaattttatatatatttttttaatagagacagggtttctccatgttggtcaggctgatcttgaactcccgacctcaggtgataggcccacctcagcctcccaaagtgctgggattacaagcatgagccaccgtgcccggccaatttttgtatttttagtagagacagttttcactatgttggccaggatggtctcaatctcttgacctaatgatctgccggcctcagcctctcaaagtgctggggttacaggcgtaagccaccgcatcctgcctagacactgactttttcaacacattttccctggaagaaccaagaccaattctgatgggcttcccaaaggatgcaggttgtaatggattaacagttaacatatgtgaacctgaaagtgcttggcaaatccaaataaatatgttttcttttttggggtatggggggacagggtctcactctggccaggctggagtgtagtggcactatcatagctcactgcagcctcaaattcctggactcacgtgatctccctgcctcagcctcctgaatagctgagactacagacatgcaccaccacgcccagctaaattttttattttttgtggagacaaagtctcaccatgttgcccaggctggtctcgaactcccaggctcaagcaattttaaagtgctaggattacaggtgtgagtagctgcacccagccccaaatgaattatgcagtccaataatcttagggggtaatgatggagggcaccttgctttgtgcacctgaaccgccactgtcattgacaccagagtgctttagctcttctgcttattacccttcccactggtattaattagccatcattcctcattgccagtgggcactgcttcctttgtccaagggtacagcatcaacaggaggtctcacaggctagcaccagggaaccctcacttttctagctaccactgaggctccgcctcccttgtctcttgtggagtggcctggctccgttcccatttccctatttggatgtgaatgtcacttagccagtttgcccacatgatttcccagagccaggaagggaaacgccttggtgcagagatgcaatcacggctaccaccaaggaaaagaaggcacatccttggcgattctgtcacgtggtatctctttcttctttctttcttttttttttttgttgttgttgttcttgtaggttgtttggtctgtttggtttgtttttgagaaggagttttgctcttgtcgcccaggctggagtgcaatggtgcgatctcggctcactgcaacctccttctcccgggttctagtgattctcctgcctcaatctcctgagtagctgggattacaggtgcctgccaccacgcccagctaattttttgtttgtttgttttgagacggagtctgggtctgtcgcccaagctggagtgcagtggcgccatctcggctcactgcaagctccgcctcctgggttcaccccattctcctgcctcagcctcctgagtagctgggactacaggcgcccgacaccacgcccggctaattttttgtagttttagtaaagacggggtttcactatgttagccaggatggtctcgatctcctgaccttgtgatccgcccgcctcggcctcccaaagtgctaggattataggcatgagccaccgcgcccggcagatgcctggctaatttttgtatttttagtggagatggggtttcatcatgttggccaggctggtcttgagctcctgacctcaggtgatccatctgcctcggcctctcaaagtgctgggattacaggcatgaggccctgcacccggccacttacagctgaatcctaaacttgtattgtctgaatctaaaattgggcccatgtgcaggaatggtgacatgaagggaggcgaggtctaagccctgttgagtccttgtgcaaagcggaaccatattaagaacctaaaacttaatatgttaatatgagtgcagtggctcacgcctgtaatcccagcactttggaaggccaaggcaggcggatcacgaggtcacgagttcaagactagcttggccaacattgggaaaccccgtctctactaaaaatacaaaaattaggttcatgcctgtaatcccagctactaaggaggctgaggcaagagaatcgttttaacctgggaagcagaggctgcagtgagccgagagcacatgattgcactccagcctgggtgatagtgagagactgcgactcaaaaaaacaaaaaggtcgggcgtggtggctcacacctgtaatcccagcactttgggaggctgaggcaggcagatcatgaggtcaggagttcaagaccagcctggccaacatgatgaaacctcatctctactaaaagtacaaaaaattatctgggtgtggtggcgagtgtctgtaatcacagctactcgggaggctgaggcagaagaatcgcttgaacccgggaggcagaggttgcagtgagctgagattgcgacattgtactccagcctgggcaacaagagcgaaactccgtctcaaaaaaaaaaataataataataattagccgggtgtggtggcatgtgcctgtagtcccagctgcttgagaggctgaggcacgagaatcgcctgaacctgggagacagagaatgcagtgagctgagacatgacactgcactccagcctgggcaacagaatgatattctgtttccaaaaaaaaaaaaaaaaaaacaaatcagaacatcagtctctaaggattgcactgagaattgtgagctcaaagtgtccacagtgcctggtacacagtagaacacagaaaatttcagtttcattccagtctctgggattctttctgagagcaggaatttaaccttattcatttaagtaatccctcagtgctctgcacatgactttactttatagttgttgaattgaaccaggatcaaagagcagctcattgtccagcctcttcacttcatacatgagaaactgagcagcacagagggcaactgtaactcatccacatcccacttgtttgtttttttgtttgtttgtttgtttgtttttgatacggagtctctctctgttgcccaggctggagtgcaggggtgcgatcttggctcactgcaacctctgcctcccaggttcaagcgattctcctgcctcagcctccggagtagctgggactacaggcatgtgccaggacgcctggctaattttttgtatttttagtagagatggggtttcaccatgttaaccaggacggtctcaatctcctaacctcatgatccgcctgcctcgggctcccaaagtgctgagattacaggcgtgagccaccacatccggccatcccacttgtattttatggctggatctttttttttcctgagatggagtttcactcttgttgcccacgctggagtgcaatggcgcgatctcggctcactaaaacctccagggtagctgggattcccagcttcccgagtaggtgggattacaggcacatgccaccacgtttggctaattttgtatttttagcagagacagggtttctccatgttagtcaacctggtcttgaattcccaacctcaggtgatccgcccgcctcggcttcctaaagtgttggaattacaggcatgagccaccatgcccagcctttcttttttttcctgagacatagtcttgctctgtcgcccagagctgaagtgcaatgatacgatattggctcactgcaacctccacctcccgggttcaagcaattctcctgcctcagcctcctgagtagctgggattttaggtacctgcaccatccccgtctaatttttgtatttttagtagagacggggtttcaccttgttggtcaggctggtctcaaactcctgacctcaggtgatctacccacctcggcctcccaaagtgtcaggattaccggtatgagccaccgtgcctggccactaattttattttatttttttgtagagagggggtcccggtatgttgcccaggtgagtctcaaattcctgggctcaattctcccaccctggcctcccaaagtggtacaattgcaggtatgagccctgatttcttatatggtaaagacagtaactggcctctctagggactggcaggtgtgggttcgaccccagctctgccaaccaccaaagtccaagtgtttattgtccacctggactgcctcagacacttgcaggatgtggtaagtactatgacacaggcgcacagaaggtgctctgggaacagcttgtcttcatgtttacaatggcttctttccctagccaaggactctatcagccttgccacttggggacaggttgagctcgctcagggagtcaggccccacagggctccctgccaacctcccatcattgtgattgaatttattctttatttttcttccaggaacatcagcgcacttgtaacaataataatcatcttttctactgggtatactgtttcatggtttacaaagcactttcacatccattatctcatttaatcacttcctcctctacattcctacaacagtttcttggtacctcttcagtataatattctgcctggtataacaagcctatttccctttactgcatttatttttactcacaagttccagcatataattcaggcatctttgcaccttggacacttctgtgtacaaagtaagcacaataaaagtttgacatgccagtcacagcagccttcgaccacagtaccagctacttgggaggttgaggcaggaggattgcttgagctcaggagtttgagtccagcctgggcaacatagcaagaccctgtctcttcgaaaaagtttgccggctgggcctgctggctcacgcctgcaatccgagcactttgggaggtcgaggtgggcggatcacttgaggtcagaagttcaagaccagcctggccaatatggtgaaaccccatctctactaaaaatacaaaaaaattagccgggcattgtggtgtgtgcctgtaatcccagctactcaggaggctgaggcaggagaattgcttgaacctgggaggcggaggttgcagtgagccgagatcgtgccactgcactccagcctgggcaacagagaaagactccatctcaaataaaaaaaaaaagaagtttgccatattgaatcatcagtgttgcaggtctttctcattcattactgccatcttcactcctttcattcaatgggattgcctactaaggacaaagctgggttctttggaggggaaatgaggcaagaagttcagaatcaagtgaagggggaagacacaagtgaaggccctgatccctggtaggccacagtacatgcttcatgctttagcagcggtgcaaacacagttggggctgggcacggtgactcacacctgtaattctagcgcattggaaggtaattcggccacactgggaggctgaggcgggagaattgcttgatgccaggagtttgagaccagcccaggcaacagaaggagaccttctgttttaaattttttttttttaatgtaaaaacttaggttgccaggcgcggcggctcacacctgtaatcctagcactttgggaagctgaggggggcagatcacgaggtcaggagtctgagaccagcctggccaacatggtggaaccccatctctactaaaaatacaaaaattacccaggcgtggtggcacgcgcctgtaatcccagctactcaggaggctgaagcaggagaatcgcttgaatctgggaggcggaggttgcagtgagccaagatcacccccctgcactccagcctgggcgacagagcaagactccatctcacaagacaaaacaaaacaaaacaaacaaaaaaacccctaggtcttgtggcatgcactagcggtaccagctactcaggggctgagtcaggaggatcacctaagcccaaggaatggaggttccatcatgatcttgccactgtactccagcctgggtgacagagcaaaatcctgtctcaaagaaccaacaaacaaaaagaaaaaaaaatactcttgcttcccagagtttggggtgactttttttttttaagacagggtctcactgtgtcacctaggctggagtgcagtggtgcgatcatggctcactgcagccttgacctcccaggctcaggtgattcttcaagagtttggggtgactgattttatctgggggtgactgtgaagcaggaatgcttcttggaaggatcttactcagcagagaaggaaactgcagggctgaagaggcaaacgggacacatttgggaagggccacaaatgtgtcccttgggaaaaagtggacagctgcatggaaaaattctcctcaaaaagaataggaggctgggcgcggtggctcacacctgtaattctagcactttgagaggccgaggcgggtggatcacttgaggtcaggagttcaagaccagcctggccaacatggtgaaaccctgtctctactaaaaatacaaaaattagcttggtgtggtggcgcatgcctgtaatccgagctgctctggaggctgaggcaggagaatggcttgaacctgggaggcggagatggcaagatagtgccactgcacaacagagtgagactgtgtcaaaaaaaaaaaaaaaaaaagggaaagggggcaaaatgggctgcttttctttcgttttcttttttttttgagagggagtctccctctgtcgcccaggctggagtgcagtggcgccatctccgctcactgcaagctccgcctcccgagttcacgccattctcctgcctcagcctcctgagtagcttggactacaggcgcccgccaccacacctggctaattttttgtatttttagtagagacggggtttcactgtgttagccaggatggtctcgatcttttggcctcgtgatccgcccgcctcagcctcccaaaatgctgggattacaggcgtgaaccaccgcgcccggcctgggttgcttttctaaaaaggtctaactcaccgcattgtcctagggctgaggcgtcagaaagtcgaagtttcaggaaaaggggaccccttcctcccacactcagatgctgcttagaaaagcacatggagcacaactccctcgcatttttctttttctttctttctttttgagacggagtctcactgtcatccaggctggagtgcagtggtggatctcggcgcactgcaacctgcctcccaggttcaagcggttctcctgcctcagcctcccgagtagctgggactataggcgcccactaccacgcccggctaatttttgtatttttagtaaagacagggtttcaccatcttggccagactggtctcgaactcctgacctcaggtgatccgcccacctcggcttcccaaagtgctgggatacaagcgtgagccaccgcgcccgataactttcttttttcttttttttgagacagggtctcgctctgtcgcccaggctggagtgcagtggcacgatcttggctcactgcagcctcgacctctcggttcaaacgatcctcccacctcagcctccggagtagctgggactacaggtgtgcgccaccacccctgctgattttttcattttgattttaatttttgtagagacaggattttgccatgttgcccaggctggtctgaaactcctgggctcaatcgaccctccagtctcaaccttccaaagtgctgggattccaggcgtgagccaccgcgcccggtcgcatttccttagtaaaggggtgaggggcgcccatctcctgccatccttctctggagagaggcgaggtgcttgaagtcccaaattcctcgtgtagtgagaaaacaggggaggcagaaaatccccaagatatcttcagaaacgaaggtggaggggggcgcgcagccctcactttcctcagataaaggagggacagggagagcggcccccaagagtgcttagaaaaggagtgtatgtgccccaaatattcctcggaaaaggcggtggaccctggattctccaaatgctccttagggatcccgaactcccatgttttcttaggaaacagagctggggtcccgaatctacaacataatcgtgatcccggcaattgtcctcagaaaaccgggcagggcaagaaacccccaaactctctcagaagaggggtcggggcaagatttccgaagatcctcctcagaacgggggccagggaaaagaatcccgaagcagagtcttctcagaaccggggcgcgcgccagaatctccaagattctcctggatagagagggtcgaagccacaagacgaggcagaaagagcgcgcggccaccggagccccttagaaacactgccaggccacgaagcgcccgggctcctcagaggcgccgctcgcagcccgtcgtagctgccccacgcccgcctggccaaggccgcctccggtgcattatgggtggggagcccctgcagagcactgcggggaaccccctgcccagccagttgccggccgccgggtggcccaggcgatccgccctccggggtcccagggagccggccacgaattgactcgtccccctaggccccgcccctcgcggggttcccgccccgaagtttaagtcccgcccccgcatggccttgagtggctctgcggcccgctcccatctaccattggcaggatgcctgtcagtcattccgtcccgcctcctcggacccgccccggccggcggcgcgatcccgagaaccagccggcccgcgcactcactggtcgtcatgcgctgtctgtcatgaagctggccacaccttccatggggtgcgggtcctgggagtcctggctggacctcattggcttgtggcgccttcactcggagagacgcgcctcaacccggaagtgtgcgaggcgaaatctgcctagcaaccggggaagccgggctgtgaagcgggcaatttcagtgtgagactgagccgcgagactgagctgcggctccgagcgctgcgcggcggctcctcccgcccagggtcagcgccccggcgcgcgcacgcgcacccccgccgcccgagcgcgccccgcgccgcccgcgcagtcggtcggtcggtcgtctgtcctgtcgccgctgccgccgccgccacagcggccgccgcgggcgccacctgagggagtcgcctccgcgggacgccacaagacctgaccggactgcgccgcccgaggccgtcggccgccgtcagcgagggcgccgagcaacttcggtgagtaaggggcaggcgccgctggcgggtccccggtttccggtgccccaggctctctggggcttccgcttctcccgcactaccttggccgagtttactcccttctccacagcacttccccctcaggggagcccctgctctgggcccccccgcctctccaggggacccccgcctctctaggagaccccgtctctcttagggaccctcgcctctcttggggacacacccgcctctctaggggcctcccgcctctccaggagacccttgcctctctaggggaccccgtctctcttggggaccccgtctctccaggcaggggatcccatctttctagcgacccccacctttctaggggactttcttcccatctaggggacccttgcctctctaggggactcccatctctccaggcaggggaccccgcttctctaggggaacgctgcctctctagaggatccgtgcctttctagaggatccccacctctctaggggaccccgtctctctaggggacctcgtctctagggaacccccgtctctccgaggggagccctgtctctctaggcgaccctgcttctctgaggggacaacccctcttatcaggggctcccccgcctctctgaggacccctgccggagggaacccccacctctctgaggaatcctgcctttgacaggaactaactcccttctttggggatccccaactctttgagaattcccggttatctgaggggactcccttcttcactgagggtccctctacttttctcaggaacccatccttttgagggacccctgcctccctagagaccccttcctatctgaggacccccgcctctgaggggagtccctttctctgagggacccctgcctctttgaggggaatccccatctctctgagagaccctctgcctctctgagggtcccccgctttctttgaggggccctggcctctctaagaccctatcctcactcctctaaggagagacccctgattctatcagggtgtactttctctgagggatcccccaccttttgtggacccctggggaaccccttcttccccgggggacccctcttttcagaagacattgctgcttctcggaggaagccttgcctctctgtggggatctccccacccccacctctctcagctgtggtcctacttttctgacttgtccccctttctttttttttttgagacagagtctcattccgtctcccaggctggagtgcagtggtgcgatctgggctcactgtaacctctgcctcctgggttcaagcgactcttctgcctcagcttcctgagtagctgggactacaggcacccaccaccatgcctggctaatttttgtatttttgtagagagggggtttcatcatgttggccaggctggtctcgaacttctgagctcaggtgatccacccgcctcggcctcccacagtgttgggattacaggtgtgagccaccgtgcctggcccccgctttttgatgagtgccttcactttcctgagggggtcccccacttctttgaaatgcccatctgactggatcgttagttttctgaggtatacccctactttaccagtatccttcttttctatttcttctgggcccccaaatgctctatggatcctgcagttttctgaggggtccccagtttctccagaggttttccccttaacttgagatatcccactcctgtaggctcctcacatctctgaagtgtgtctccccttttccaagatatcccgtctcccgatgggagacactgtggatcttcttcacttccctgaggggtccctctgaattccgtggggttgcctcccacttgccctctttctagaggctttcctcttgattttctaagggagaaactctttatttatccttggagcactcacatcaagcttctcctctttttttttttttttggagatggagtttcgctcttgttgcctaggctggagtgcaatggtgtgatctctggctcaccgcaacctccgcctcctgggttcaagcaattctcctgcctcagcctcctgagcagctgggattacaggcatgtgccaccacacctggctaattttgtatttttagtagagatggggtttctccatgtgggtcagggtggtctcgaactcccaacctcaggtgatccgccggcctcggcctcccaaagtgctgggattacaggcgtgaaccaccgcgcccggccaagcttctcctctttctgtctgtggcacccactttcccccaactgtggaggaagagagcagaaatgtacccctccttcagtctttgttgccactctaggggtattctctggacttttatttcggtttccaggagcctggaggattttgtggctggaggggaaagtcaaaaagcatgatttcctcatgtccctctaagacctgctagatttgggggagcaggagctgctactagatgaccaccttagttactccattttccagccgtgaggccatcacagtgttgtcaggcctttgtgaagacaaaagggacaagggagaaacattgtatccccattatcacactgtcaagctgtgggagtgacccacttcctgtcccatccctcagtcctccccctgcatagtataacttaaccttccctccccgtgctgaaaaaaaatcaaaataaaaaggaaaagaaaactctccttcatctcttcctgttgcattttctctcccgagaccccctgattcaatccttgatcaaataggatccctagttcgtaggccagtttggtttgaaagacagagcaagaagcaggaaatggatcaccttagatccagaaacaggggaagggaggcaagggacaggatttgacgacatttctgtaagttttaggtgactttggcctggcccaaaaggaactttttacgtggcgtttacaaatctcatatgtactttttttaatggcccaccctggattccaagttcactccagtagctaattttatctgctttgccaaatgcagagctctgtggagcccaagtagatgaatgctggcattgagagatggtccaaaggacaggaatgaactcagtttgaaacctgagtaacttgtaaccacttcgtgtccacgcacaagtctcaagctaaaaatgtggggagagtttgactgaagtagagttctgaagtataggctgcgctagtgtttggtttagcatttcaacaagttcttccctctgactccattggaactgcagttcactttacagtttgactgagggcagtctctctcctgttcatttccatctgggtcttgcttaatttgagtcctttgtgaagactcctgccgaggctataatttgagttctaaatctgtcggtggaccatgtggacacaagtttcaactcgagctattttcttctggggagaagtgcttggagactttcctgggccctctgctgctgggctaagtcaagtccaggcaggaggctgctgcagacttggttgctcttctcctgcctcttcctggtcagctgtaggcactgccctcaggggaagggaaagttggaggggagtttgggactgagatgagggtagagaagtgcctgaggtgagggtagagaagtgcctgcacgtatttactattttattttatttttttgagacagggtctcactttgtcactcaggcgggagtgcagtggtgcgatctcggctcactgcaacctctgccctactggctcacgtgatcctcccacctcagcctctgaagtagctgggaccacaggcgcatgccaccacgcccggctatatttttgtatttttggtagagacgaggtctcaccatgttgcccaggctagtctcaaactcctgagctcaagtgatctgcccgcctcagcctcccaaggtgttgggattacaggcgtgagccactgtgaccgacctattattttaaataaaacctataggaccagcagatgggatgttaaaaagggaatggacaactttgaagtcagaaggagccagttcagattctggtgctgcccttcttagttatgtggccttggacaagtgatggcacaaaattggcatgttattaaatattcgagggaacacattgctgtgaatgtgtgtgtcaagttgcttactgatgatgggaggtgcttactagatggatgaatgaatgaatccgagatgatgaactggaggtggacagcacagctcctggcacacagttggtgtgcagtaaaggctgcttgttgtattcctggcctggactcacagaccaggaagcgcttgatattctgccaaggctaaaaatgcccaaagagaaagaaacttggtatgtctcttggaaaacccactcccctactgcgtctcttagcaagagttttctgtgttctgataccagatgtgagatgggtttactgtatggcagggcatttgtgtttctcttggccttggtgtctccccctgtaaaatggggtaatttgtgaattaagggcaagtagggagatgtattactctaattagaccacaggcaagatagaagattataatggacttgaagaattgtgggaagaagaaaatagatgaactatgtacgcctaagggatcacatgcgtattatgagactgcttgagtgagtgagtccagcagttacctggtgagtgatctgttcttacactttagaaccttgaaagaagagccattctttcattgtaatagatcagatttggggacaaaagactgggaaagtgatgtacaaagccatttgacgccacacaataatagtactttgagagggccagtgtgtggcttagtgcccacgaggagatcagaatgcacctcaagctcccaaggcccagagggctgtggagatgctaactcagcttagaggctggggcaggggtcggggggcagtggaatagaggggagtggacaggacattttacaaaatttttttcttgagaggatttttttcttaacaattagtaaaagccatagaatcatggctggtgaattaggcccagccttcttcacttactagtatgggaatagatggcattctgcccctgacggctaaaacccaggaggaaataatgggtgaaaatctgaactaggcccctggtgggctgctcctatgtttgaagaaagggttgtgggtttttttgtttgttttcttcctggaaatataccctctctcttcctccttccctcctttctttctctctttcatgcacacatatatagacacacactgactttggtattgaagcaaagaaatatgcaccaatcttaaatttctttcaattcttttaaggacagttattccattacatgggaaaggagcaaaatttattatatttaaaatataagaactaaggtaaacaactttaaagggatcactctcccctttaaaattatgctatgtctcttgtgtaccacagacttcactttggtggatggtggggccaccaccaagtctctatctaacaggaagttttttaaacttgtttttttttacttgaaggatccttacagcaataaaaaaccttggatagttagaaatgatattgatctaggtacatttattagatgtaatgtaatgtggttatctgttggtgggcaggtctaaaaggcatgtgggtccaaacactgcccagcttctaactctggacgataaaaactgttgatttatggaactgaaatagctagggaagtcagggtttccttcctgttggagacagcactgggggcattaaatccctgtgggatcttgatgataagaaataagctgacctcttttggaattgggaaataactactgtgtcaagtggttccatccaaatgaatggatggtgttatttttgatttctagttttaagtttgacttcatcctctcagaaacttgactgcctttgtttatactggtgtgtcttttgaataagagtttttcctttttttttttttttttttttttgagacagagtcttgtgctctgtcacccaggctggagtgcagtggtgcaatcacagttcactgcagcctcgacttccgggctcaagtgatcctcccacctcagcctcttgagtagctgggactacaggcatgcgccaccatgcccggctaattttgtatttttgtagagacagggtctcgctatgtttcccaggctggtcttgaactcctgagttcaagtgattctctcactttggcctcccaaagtgttgggattataggtgtgtgcctggcccaagtttattgtgtgtgtgtttttttttttttttccagacagagtctcgctctgtcacctaggctggagtgcagtggtgcgatcttggctcactgcaacctccacctcctgggttcaagcaattctctgtcttagccacccgagtagctgggattacaggcacccaccaccatgcctggctaatttttgtatttttagtagagacggggtttcaccatcttggccaagctggtctcgaatccctgacctcgtgatccacctgcctcagcctcccaaagtgctgggattagaggcgtgagccactgcgtccggtcaagtttttttttttttttttgaaacagagcagagtcttgctctgtcacccagcctggagtgtagtggcacaatcttggctcactgcaacctctgcctcctgggttcaagccattcttctgcctcagcctccccagtagctaggattacaagtgtgcaccactgcgctcagctgatttttgtatttttagtagagacagggtttcaccatgttggccaggctggtcttgaactcctgaccttatgaactgcctgcctcggactgccaaagtgttgggattacaggcgtgagccaccgtgcctggccagtttattcttttaaattggcttataaggggccaggtgcggtggcttacgcctgtaaccctagcactttgggaggctgaggcaggggatcacttgagatcaggagtttgagaccagcctggccaaaatggcaaaaccctgtctactaaaaatccaaaaattagctgggcgtggtggcacatgcctgtaatcccagctactcgggaggctgaggcacaagaatggcttgaacctgagtgagaggcagagtttgcagtgagctgaggtcgggccactgcactccagcctgagtgacagagtgagattccgtgtaaaaaaaaaaaaattataagggacaagtgaacacttaagagctttacttgtgtggccataagatatggtgtatgtgtgttttctagtgcaatttacattacattaaaaattagaaagtgttaaatcttctggcccatgtaacttcctatgcgaacaaataattcaggaacaaacactttcatgcctaagataaaacattttcatgcttggtgatgggggtctggcagtgagcaggactgacacagctggccttccagaagcttacatcttagttgcagacaaataaacaagcaaatgaatgaaagaacattgtgaggtttcttgagaatatccctaagtgctgcagctaccctcattgggagcttcaggtggggtttcttggaggtgtagaagtgaaacctcactacctctttaatttcctcactgggctcctgtttcctgtctctaaaaggagacagaaattatggcattttcctacttgattgttggcgatagttgattcatgaccactgtggctgtaatcttggagaaacgagagaaactagaatggtcacggcagggagcattttcaggtttgcctttgtttctttttttttttttggagacagtcttgctctgtcgcccaggctggagtgcagtggcgtgatcttggctcactgcaacctccacctcctgggttcaagtgattctcctacctcagcctcccgagtagctgggattacaggcacctgccaccacggctggctaattttttgtgttttagtagagatgggggtttcaccatgttgcccagggtggtctcgaactcctgagctcaagcaatcctcccgcctaggcctcccaaagtgctgggattacaggtgtgagccaccatgcctggccaagtttgcctttcttgaagtcagtggagacgtgtttttggaatcctgtggcatttcttcatggcaatgcatattacactaagtgataaaccgctctaaaagcccttcccttgttgaaatcttaaaaacattcagacaagctggggctgcctgggtgttggtggtggtttaggaataatgagatttccaatagatgactgctttgttatgtattggtagactcttggtgcatggatttccctctgcccgggctttcctcttttttttttttttttttgagatggagtctcgctgtgttgcccaggttggagtgcagtagtgtgatcttggcccactgcaacctctgcctcccaggttcaagcgattctcctgtctcagcctcctgagtagctgggattacaggcggcatgctgccatgcctggctaattttttgtattttagtagagacggggtttcactgtgttgcccaggctggtcttgaactgagctcagaaaattcacccacctcggtctcccaaagtgctgggattacaggcgtgagccaccactcccggcccaggctttcctcttacactgggactgggaaggtgctgtttagacttttttatgttgggcaaggctggaagtcttagatttgacaggtgcttttcttaagtaagtgtatctgtgagaggtggggctggagagcaaggcgggatattcattttgggcacagcctcgagggcaagagggagggtgttagaaggagagtttctggttgtctttttttttcccttccacccaagttctgactctggaggtggagaggcaggcccaggccggaagtgggcgtggacaagtaatgcaactgtgcatgtgaccaggctcccacctctgggctctgctgcccttgggaagtggatgcttgctccctcctgacttcctgttctccctccttacaggctgagttcttgggctccaagttgagcacagaaaatacgttcaaggccgggcgcggtggctcacgcctgtaatcccagcactttgggaggctgaggcaggcggatcatttgagcccaggagtttgagacctgcctggccaacatggcgaaaccccgtccctactaaaaatgtaaaaactagctaggtgtggtggtgcacgcctgtaatcccaggtactctggaggctgaggcaggagaatcacttgaacccaggaggcggggtttgcaatgagctgagatcatgccactgcactccagcctgggcaacagagcgagattccgtctcaaaaaaaaaaaatagaaaacatgttcaagttaccccttttccttggtaagccgctttgtcagagctggaagccaccagtggacctgtacttgccagttttggggtctcaactaatacacccacaaactcagaggcctatctggcagggcggccaaaaagatggtttcttgttatattatcacagtgttcccctcgggagcttgtctgcaccaagagctgcctggaggtgtgtatggaacttaaagaatccgacagtagataggtccttcaggaagagtgtgttcttgaagaatcgtttgcagttacttacagctttttgctttataaaagtacggtgggagtccctgtgccatagaaactttagagccaaaaaactttgggcttgatcctgattctaccacttgctggcatgtgaccttagaaaaatagcctaacttcaagtggcctactctttctgagcctcagtttcctcaaaattaaactcaaatcctcgtttgtgggctggtttgtttgtaagcatacagcaagcggccagactgttgtagatgcctagtaaaggtagttgttaaagaatcatatttaggagccgggcacggtggctcacacctgtaaacccagcactttgggaggctgaggcgggtggatcgcctgaggtcaggagtttgagaccagcctggccaacatagtgaaaccctgtctgtactgaaaatacgaattagctgggtggtgggcgcctctaatcccagttactagggaggttgaggtaggagaatcgcttgaacctggaaggcggaggttgcagtgagctgagatcatgccactgcactccagcctgggcaacaaaagtgaaactccgtctgaaaaaaaaatcatatttaggctgaccgtttctcttgaggttggcacctgaggttggacaacaatctgtggatgttaatactgcccaagaacaaaccagttgacactgggccaataggctgagcatgtctgaaggccagtgatctggaagttcctagtttggttgatttttcccagttgagatcccttagttcattgtagctttaacccctacagcctcaccttactgtactctccatatggacttgaagtgcctcaggaaacatgatggggtaattgggaaaaaggctcaaaccttgagctcaggtgatctgcctgccttggcctcttaaagtgctgggatttcaggcatgagccactgtgcgcgacctgtttgttaggtttctttttcttttctttctttctttcttttttttgagacagtctcgctatgttgcccaggctggagtgcaatggtgcagtctcagctcattgcaacctccacctcctgggttcaagccattcttctgcgtcagcctcccgagtagctgggattacaggcgcctgccaccatgcagggctaatttttgtattttcggtagagatgaggtttcaccatgttggccaggctggtctcaaactcctgacctcgtaatctgcccaactcagcatcccaaagtgtgggattacaggcgtgagccactgctcccagccgttaggtttcttaagtggctaggtgttctgagaagaggcatagcatgggcacaggcagagacctggagttgaaaacagccaagtgagttcccttgacctgaggaggttatgctcttctaaaagtcagagtttgagctgatcacattggcaagaaaagtccaaaattgcttccaaaggtagaaagttaaaatgtgctatagtaggatccaagattaaactcaaaatagtatttaaattgagcttttattttttttgagacggagtttcgctcttgttgcccaggctggagtgcaatggcgtgatctcagcttaccgcaacctccgcctcctgggttcaagcgattctcctgcctcagcaggagaatgagtaatgtgtaatgaggctaattatatatttttagtagagatggggtttctccatgatggtcaggctggtctcgaactcccgacctcaggcgatctgcctgccttagcctaccaaagtgttgggattacaggcatgagcctccgtaccgggccttaaattgagctttcaataaacattttcaatcaggaagcaatgatggccagtgaaatcagccatctagactctgtaatggtatactgtatatgtagactttaacctccaaaggagcttcaagagaacagacttcagggctgcttctgacctttttcctttgagaattgttatcatttaagctggtctaaaattcttaatacatcagaacagttttttgttttttttgagacagagtcgcactccgttgcccaggctggagtacactggcattactgcagctttgaactcttaggcccaagccatccccttgcctcagcacccagataactaggactacaggcgcatgctatcatgccaggctaattttatttagttagttagttagttaattagttgagacagagttttgctcttgttgcccatgctggagtgcagtggcgtgatctcggctcaccacaaccttcgccttctgggttcaagcaattttcctgcctcagcttcctgagtagctgggattacaggcatgcgccaccaggctcggctaattttgtatttttagtagagatggggtttctccatgttggtcaggctggtctcgaactcctgacctcaggtgatctggctgctgcagcctcccaaagtgcagggattacaggcgtgacccactgctaaccgccttatttatttatttatttgagatggagtctcgctcttgttgcccaggctggagtgcagtggtgtgatctcgggtcaccgcaacctccgcctcccgggttcaagcaattctcctgcctcagcctcccgagtagctgagattacaggcatgcactaccacgcccagctaatttttgcatttttagtagagacggggtttcatgttggccaggctggtttccaactcctgacctcaggcgatccgcttgcctcggcctcccaaagtgctgggattacaggcgtgagccaccatgcccggccagctaattttattttttaacttttgtctcactgtgttgcccaggctggtctcaaacttctgggctcaaggacttctcccaccttggcctcccaaagtgctgggattacaggcatgagacactgtgcccggcctagaacaatttaaacttactttcggctgggtgtggtggctcacgcctgtaatcccaacattttgggaggctgaggtgggtggatcacctgaggtcaggagttcaccaacatggtgaaaccccgtctctactaaaatacaaaaattaggccaggcgtggtggctcacgcctgtaatcccagcactttgggaggccaaggcgggtggataaccaggtcaggagtttaagaccagcctggccaacatggtgaaaccctgtctttactaaaactacaaaaattagctgggcacagtggcgggcgcctgtaatcccagctacttgggaggctgaggcaggagaatcgcttgaacccgggcagcaggggttgcggtgagctgagatcacgccactgccctccagcctgggcgacagagtgagactccgtctcaaaaaaaaagcaaaaaattgccaggcatggtggcccacgcctgtaatctcagctacttgggaggctcaagcatgagaattgcttgaacctgagaggtggaggttgcagtgagccgagatcatgccaccacactccagcctggatgacagagccaggctccatctcaaacaaacaaacaaaaacctacttttttttttttttgagacagggtctcattctgttgcccacgctggagcgcagtggcagtagtgacacagctcactacagccttgacctcccaggctcaagcctgctaatttttgtattcttttttgtagggacggggttttgccatgttgcccaggctggtctggaactcctgggctcaagtgatctgcccgcctgggtctcccaaagtgctgagcttacaggtgtgagccacctcgcccagccaatttttaaactttcactgcattttcaaactttagcctttatatttaacctctcaaattgtctctattgaaggttacctttttgacctaaatttgaaataaatatcttagtcttcccaaaacaggagttagttagatatagacctgattacgtgggcatgtgagagggcatggttgttattatcaagctgtgaaagagagaacaaactagaagggcactccacctgtgttttttaaataaattacgggcatttcactataaatggggggtttggggagtatacatcctgttaggaaaacatttgggaggaatgttttcctaagttggcagatctgccatttaacaaatggggagtagggtgtgaaatagatgccaagttttaaaaatacgtttttctgcatgtccaactaaggatatttattagaccgatcatgtgactaacactccttccctgcttggggggtttgaataggctgatttccagactcgaggctgtcatatagcctttttgtttttcctggtagttttctgatttttttttttaatctttaattcatagaaaacagtttacttccatccaaattaggtgggaatttttttaaaccatatgtagacacaaaagagatattccttgccaactagtgacacatggcagatgaagacagagtgggagatacacttccggttcacaacagcacttctgagcagtttgtgcttaaccctttaggggagcatttgtgctcagaaccctggaatagcaggacagtgccagggccacacagagactcagtctggaaagagcctgcctaactgcagatggagcctgaaccctgcgctgcagaaacactgagtgtaacgaattgtggttagagacgacattcaaaacaaacacacgttgacaaagtggaccatccctagagagctgtttttcagggagcttttcagcataaacgatggtgatggggacaacgggggctactgacccatgtcccacaaactcttgatctagtgtgagaatgttgtgaatgcaaagatgattcttgtagcagtggtgatacattggaagtactgtatttttcataaagcatcactgtaagagtccctgtagctattttctggtccctccctgaagaaagaatcaggagtatcaaagtattaaggaaatcaaaatcacttaataattaatcttttcttttcttttcttttcctttcccagccaattgcattgtaatctcaccatgtaaacatggatttggggtgaaataagaaactttaaaatgatcctcccttagagattgttgttatattgtccctaaacttaatgaaaacaattttaaactttagagtactaagaatgcaaagtacagaaagtagggcccgatgtggtggctcctgcctgtaatcccagcactttgggaggcagaggattgcttgaggctaggagtttgagaccaacctggctaacatggcgaaaccctgtctctactaaaaatacaaaaattagctggtgtggtagcacgcacctgtcgtgtcagctagtccagaggctgcggcacaagaatcgcttgacgccagaaggtggaggttggagtgagccaagatgatgccactgcactccagcctagggcaacgagcgagactctgtctcaaaaaaaaaaaaaaaaaaaaaaagtagtcagtgttcgtttttcataaaggtgattaaaagaaaaaaaacttggctttttttttttttttttttgagaaggagtctccttctgtcgcacaggctggagtgcagtggcatgttcttggctcactgcaagctccgcctcccgggttcacgccaatctcctgcctcagcctcccgagtagctgggactacaggcgcgtgccaccatgcacagctaattttttgtatttttagtagagacagggtttcaccgtgttagccaggatggtctcgatctcctgatctcgtgatccaccctccttggcctcccaaagtgctgggattacaggtgcgagccactgcgcccggctgattcttcagtctttcttatgaatacattttctgcattgaaatcattttgtgtctttcagtggcaccagcctgtcagcttcgggagtatgtgcctgtaggcttcttgggctccaaaatccttgggaggagtggtctctcagttgtcgatcagtgtttatcacataagtcatcttgtatgttgtccaccaagaacttcaaataaattttctgattgaaaaagtaccaaaaaaaaggaaaagaaaaaggacagtaccttgaacattcagtaggtgatgctactctttttcagtagtttcatactagtttggagcctttggccaatttctgccataaaagcagacataaacatggaatttggccccaatttcttctcagtccctcagttgtatagggacaggctcaggtggtgtttagaagtttaagagtacactcgaaagaccattagtctatttttgctgtagttaaggtagaaggaggcctagctattattagtggggtttggtctatgaaagacaataaagtttaaaatgaatttggaagttttttgttattgttgttgttttgagacagggttgcactctgtcacctaggctagagtgcagtggcacaatcatggttcactgcagcctcaaactcctgggcttgagtgatccttctgccccagcctcctgagtagctggggctacaggcatgtgccaccaggctgggctaattttttcttttttatagagatggggtcttaccatgtcgacccggctggtttcaaattcttggcctcaagcaatcctctcaccttggcctcccaaagtgctgggattacaggtatgagccactgtgcccggcctggaagaaaattttaactaaataacaggtgttttgaaagtacagtattgggccgggcacagtggctcacgcctgtaatcccagcactttgggaggccgaggcaggtggatcatgaggtcaagagattgagaccatcctggccaacatggtgaaaccttatctctactaaaaatacaaaacaattagctgggcatggtggcgcatgcctgtagtcccagctactcaagaggctgagacaggagaatctcttgagcctgggaggtggaggttgcagtgatccgagatcgcgccactacactccagcctggtgacagagcaagactctgtctcattaaaaaaaaaaagaaaaaaagaaagtacagtattaattaacaacggctatcactaagggttttttttttttgtttttgtttttttgatttttttttttttttgagatggattctggctctgtcggccaggctgtagcgtaatagcgcgatcttggctcactgcaacctccgcctcttgggttcagcgattctcctgcctcagtcttctaagtagctgggattacaggcgtgcaccaccatgtctggctaatttttgtatttttagtagagatgaggtttcactgtgttgaccacgatggtctggaactcctgacctcaggtgatccacatgcctcggcctcccaaagttctgggattacagacgtgagccactgtgccctgccagcactaagtattgactgtcttgttttcagatcagagagaaaacttttagaaaacatggttctagccctagttgtttcttaattagagtttcttcagctttagtatggcatctgaaggtgattgcatcatatttcataatcacccagctgaactatttgctgtttagtccagcactgggcactgaggctaaaagatctttaatccaaacagcctcagcattcacccaacctgagcctatgggaccccaagcagatctggattcactgtcacttaccatctacccatctgaccctgtcttcctatgacagacagaaataaaccctgtagctatttcaccccacctacataccctgcacccctcctactccccgtccgactttcctggctgagaagttggcactgccctctggagcaggccctgtcaccagtgcacccctcactccacaggggtgtgtcattaatgtgttgcagttgatgcctccctcttaaaaaaaaaaaggggtggttgtcaccctggtgactcacacagggcttgctggctcaaactctggaatctgtatatctgtctcaagtgtcaggtctcccacctgaccacactttgctctgtttgtagttaattaaattgacattaatcaagacccaggtgaggagcagtgaggtaatagtttgcttgtattgctttaatatacatcatctgattaatgatcgtagcatgaagcagttcttaaaatatacagccaccatgttagggtgaaaaacctggatggttgccctaaaccaaccttgcgcttgggatcagggagctctttgaattcctataccgagtcacctgtttgagaataagactgttttgtttgtttggtttctgaatttgaacatttgaatttctttgtagcaaagcaaagcaaattggtgacataactgggtcagggaaagtgattgggagtcaacagtttgtattttgtatcatttttaggttgaattctcttttggcctaggggaggttgtgccagatgttgcattaagtagtgggaagattttggggggcagggcggtgtgtttggggaggtgtgaggtggcggggtggaataaactacaaaaagttgacaattgtatgtagaactcaacacagaattaggagcttttttgaactctgtttaaggggacatacagcagaaaaacaattttttttttttttagaaaaacaattttgtaaaatttgttctacatgaagtgtttttcaggtttgcggttgagacccaattattcttgggcgttacattgattttcttttcaaatgaagtagaatagaaataacagtacaggctgggtgcagtggcttatgcctgtaatcccagcattttgggaggccgatgcgaacagatcacgacatcaggagatggagaccatcctggccaagatggtgaaaccccgtctctactaaaatacaaaaaaaaaattgccgggtgtgatggaacgcgcctgtaatcccagctactggggaggctgaggcaggggaatccgtgaacctgggaagtggaggttgcagtgagccgagatagcgccactgcaccactccagcctggcgacagagcaagactctgtctccaaaaaaaagaaaaaagaaaacagtacgttgcatgtggtaaatttatgtttggtgaaacttttgtttcagttgtacatatagatttattagggtatgcgataaagcatgtcaccaccactcttcaggagtctaggtgtctcatcaggaatcgtttgttttaaaacaacatgaaaagaggcggttttggggattcctcagaacctgattttggtattgagagccttcttgtggtagattttccatgaacttgatattttccctattgaaattgtatttcgctttatgtagtttaacatctccaaagtccattctctttcaggctttcattctgtctcctgtgtttcctccttgttactggagagggaggggtgcagatttgctttcttgaggggttttcaccttctccctgaggcacgagggcagattgggaggtaactggagagggagagcagtcgtccccaagtgtcttgaggtgggtgggtctggagctttctttgtagaattctgttcactgcactggagaagtgatcgttcagccgatccacaccccgccctccccacagacaccggggccgaagttcccagagaagagcttccgcgtgacgaccccgcgggggtgacattctaacccgcgtttcagaggcaaccctgagttgcttgaggtcgcccagctcagctggcgcgaggtcagcagtgagcgcgtcgtgagtcagccttgggtgcggcccgcccggctttgccgccggtgagttggccacgacccttcggcctgcggagggcgctgggactcggcggggagggagccagccggagcccgcgtgggaaaccagcgcgcccaacgaggtgtcgcgtgggagcgcgccggagaggggcggtgcttccggggcggtaccgtccggccccgccccctcaactcaggggcccgccttctacgcctggagccccgcccacgagctcctcccttctcgtcaggccccgcccctcggtcgccacgccccgcccagccgggcgcgggcgggcggcgtcgcctttaagagctccccggtgttttgggggccgcgggccgggcgcgctgacctggtgcgcatgtcccgggcggtgacgccggcgccgggctccatgtgtgcggccgaggggcgcattatctggccggcggcgcgggcgggcgggcggaccggcgcagcgagcgccgcgggcccgggcggccccacaggcggaacgagcgcgcgcggcccggcgcccccggcccctccgccgcccggccccgcgggcgaccccggaccagcagcccccgtaacctgcgcgctgccctagggcccggccgacccgcggcccggtaagttctggaccaaacttggcggggggcgggggctggggacgcacggctgagactggagcggcgcgggccgcgcagggtcggggcctcggggggctctgaaggacccctgcatgagcgtggaaaagtgagagcgagcgagttctactccttgtattctgggagcgtcttcttgcgctgccctggaaagttccttgccccgaggcggcccgggcacgtgggggccgggcggggcgggggtcccggaaagtcgcggcgtcgccccgcttccgtcctgcgcttcctgcggggtcgggggaagggctgggccgcgaggcgcctcttccgagtggtcgggacgggtggaggcggcgggaagacggcacgtgggcgcgcggggcgggggtcccgctcaggggcgggggtccggggcgggttgggcagcaacgctgaaccccgcggcggcggcggcggcggcggcggcggatcccgtgtcagaataagagtccccgcgcgcccacgcctggagggccggccctcccccagctcgcgcccttcctgcctaacccccgggagccgcgggaccctttcccctctctgatctccggcctttctcaaggcccgacactttaaatttgcctccccatctaggcggtggctccattgatttcttttttcccacctagagtgggtcggcatcagtgactagacagcagcagctggccttttaaagggattattgccaagaatcggaattgatcacttcaacaaggaaaggcttatgggcagggcccaggctgagagcctgacggacacttggattgtgcgcacactgggacccagaaatgaatggtgacccctcccttaggaagtgaatgacaacccttaggtgcgtgtttctgccctgagaattttgcacagggcaaaattttgtaggtctgacttaacgtctttaggtgtatagttcatccttatcttaagagctgtggattctttagatcaaagtccgagtgagtcacttgagcctttaattttctttcttcctaccagtttacttctttcagttttcttggagtacatagtgctggttacatctctggttctgtgtgcccattcacacagtgacacctcctggctgtggcagcacagaaactgagagccctctgtgcgggtgtctcagtcttggactgtagtcctgttgactgacttaactcttctggtagtcgttacaagttttcttttaaactagattacatgaaataatgtttgttggcaccagtttgttaacatatgctaagcagtagtttgtcagacctgaccacaagctgtggagggctgatagctcatactagccctcgggtttgagtgcctactgtgtgctaagctcccctgcacagacatattcagtgcctataacaatcccgtggggagtagggaagtattatctgcgctttacaggtcaggaaattggggctgctggaggccaggcggcttgctcaaggcctcttagtagagaggcagagccaggcagcccgtacttggtgctctagagcccacaaatgctgcagtttgcgaaccctagtgagcatttccctggcgcttctaaaatacaaggccattttcttgtccaggatccagggcacctctgtttgcggatgtaggggataatctggtgacatggggacaccatgctagccctgctttgttctagtggagcagcgttaccagctggattttaaggaactgaactacagagttagttgctactttgcattcgcttcttcagctttggactcagaaaagttggcccttttctagaggaaacagtttataggatgtgggaaatttgcaagggattttctgtatcctctgtcttcacttattccctcccctccttcatctttcagttcttatttgtctcataaaattccgaagctggtttttatgaagattgcttctcatcttggaagggctatagagaatggaaagatttggatgcagtgtgttttgtttgtttgtttgtttttttgagacggagtctcgctctgtcatccagtctggagtggcacgatcttggttcactgcaacttccgcctctcaggttcaagcaattctcctgcctcagcctcccgagtagttgggactaccatgcccggctaagttttgtatttttagtagagacggggtttcaccatgctggccaggctggtctcgaactcctgacctcgtgatctgcccacctcagcctcccaaagtgctgggattacaggcgtgagccaccacgcctggcggatgcattgttatttccactcagatgacatcattttttaaaatgtcaagtcatctctattaatgcagtatcatttggcaaatcctataatcttatattttgatagtgagggaaaaatataatgctactttcggtaggaaaaaatcctggaaggatttgtaccagaatgtcaataaaggtctctacattaggattagcaatagtttttcttttttagaaaactttttagtgtctctgtattttgcgtgtgtgtgtatgtttttaatgaggaaacatgttttaaatactctaattttcaactcttcagtagctcctctgacttgttttgcatcatttattttctgaatttctggcattgcaggtagtgatttctagattgatatattcaacaaatatcagagtgcatactgtgccttcgacactgctaggaatccctcctcagtagagtttatagtgagattagtgggccaggagtcgtaattaatcttataaacatggggaaacttacagggatcaaggagagaaggacactgtgacctggtgagcccgaaaggacctttctcctactggggtcagagaacaagaagggggaccctcttgaaggggattaaggcaagggctggtgcagtgaggctcacagccgggacctctttgggtcttagcagatgactaaaggatgcctctgaagaatgtggctggtaaagttgtaaagccattcttgaaatgttggctttttttttttttttttttttggtgtttgttctcttggaagaaaattaagaatgaccagcagagttttggatatatgaattcccaacagagacaaaaatgtaatggcccttaccactgaatttgtttaaggaccatcattagcatgtactgacacctcaaagcctgggcagctcagatgcttttctggagaactacctgcttggactcggggtgtttctgtgccatcaaatggaacaggcagggctattttctctagacctttcccccccataattgagttaatttatgctggttgtagaaaactaggaagattatgaaataggtgagtgggtgaagtcttctcgagcagctgtcctggggtaatagagcatccctgggatttcctcctaacccttgtctggttgggaagtgtggcagaaccagaagaacaagttggcaatgtcatagtttgaggcatacagaactatgctgcctgctaagtgtggtcgtttgttagaatggatgcttttgagttatctgagctgcttcgggaggtagctttccacagtctggcctcagactgtgggtcttccaggttaacaggacttaagtgctaactgtgcaaaggtatgtctttgaatggaattaggaaggcagtgtattaaaaataagaaggttgagataaaaaaagacggatcttgaagtggttggtggttgcagcgaggtggaaatagtgagacccgtactgtcagaaacaaaggtaccactggggacagatcccgctcgagcatgggttccccagcatccccgcaaacaggatctgggacttttttgtcaagagagtgtcagaccgttggcttcttgcccctcccccaccttgtgctttccagactatatttgtgacctctttttgtctgatggaaatgtaggttagtcttttagaagacaaaggaatttaccctaatagaatacctttaggtagcctcaggaagtgattgggaatccacgaaaccctctaggtgtgggagagaggggccctcagtgagaatgtcacacgtttgcaccagtttgcacagttgccagggccccttgcagctcctctgtacgctgtaccccctttgtctctcctcagcctccagaggcaccttcacaggtgagtttgtcagggaacttgcctttctgtctgattcctgattttagggttccttatatggaagggctgaagacctgcaatttccgaggatgctggaggctagcttctgagataggatttgctggcaggagatgagcagtactctaaaggagggctcccagcaagtcaaagtgggagttcttggggcagggggtgggggatgggggtggtgggtggagtggtcaaggcttcagggctttcctgctgcttggcctcaaagatagtagctatgcctgtggggaggggtgtggccatgtggtacaggattggggagaaattccacttgtttgaaggatttgttgaagaatccctcagctattcctcctgcagttccgtctcaggacctggcgctgcgtggcctgccttgccggttagatattctggtttgaaccttgaaacgtagcctaaataaggtggtgccttcgagcacacactttaaaaatactgctgcattatggtggcacagcagctcctcctgtgccaaggaggccactttgagtctagggggcacctgctttttgccaagtgtggccgtgtgcctattgctgagcagcctgtctctagtggcatccaggacagccctggctttgcctcaagacagcctggtgtgagctctgcccagccacttcctagcgaaagaccttgttgaacatcacccctgtttcccatttctgtcaagggggtacttactatctcccgtggaaggctgtgttgggagtgagataacaagtgcaaatgatcgaccccagtgcctgtgtgttccacatgttgcagttcagtgagtactgttatgactgtaacagatgagccagagttcacaagcattaacaactgccccacctcttctgtgggggatgacaccaccctcatggcaaactgtcactgtctgcatgccccctttggagccacactggggcgcatgcctcagctttgtgccccagcctattcccctctctccatgttcctgtgaagaaggcaaagttccccacaggaggtgatacttgccatagtcaccttgctcattattcggcggctgggacccaacccagcctttctgatttcagacgttgtctattttttccactgccttggggccttcttgacgatactgaatgcctgggttggttgtgccccaagccaggaggcagcctctttcctggcccagggcttgtggaagccagcatccggacttccatctgtgagatgggaagctgtttgccgggcagatctgtcatgggagccttccttagagaactgagaggggtccctgtcactgagtggactctgggtggaggctggaagtaggtggtttgatggtacttgcagtggtgtctgggagcgccagggtgaatctcatcctcctggacttgcctttcagactgacagctctccagccagcttggagttggacagatctggctttgtcactgacgatatgcagtttaccactcttcagcgttgggtgggtcacctgatcacctggcctcagctttctcttatgttggcggagacagcatctttgacctaacaggatgctgtgaggacaagtggaaagtgtctacaggcagtcaggggtattccagcctttgcctctccatttacctcagagccaaaaagctttctccccccagatgtcaactacacagtgattcttgaacacctcatatctcagttatcacatataatgtaacactcagattgaggagcttggttttctttataacagaatcctactgcaagctaacaatttggaggcctaagagtcaggtcaaggccgggcgcggcagctcacgtctgtaatcctagcactttgggagcctaaggcaggctgattgtttgagcccagtagttcgagacccgcctgggcaatgtagcaatcccccatctctctctctctctctctcttttttttttggtgggctgtctcaggccgcttttttttctctctctttttttttaatttttaattttttttttaatttttttgttgagacggagtcttgctctgtcagccaggctggagtgcagtgacgcgatctcagctcactgcaagctccgcctccggggttcatgccattctcctgcctcagcctcccaagtagctgggactacaggtgcccgccaccacacccggctaattttttgtatatttagtagagacggggtttcaccatgttggccaggatggtcttgatttcttgaccttgtgatccacctgcctcggcctcccaaagtgctggcattacaggcgtgagccaccgtgcccggccgattccccatctcttaaaaaaaaaaaaattagccaggtgtggtggcatgcatctgtaggccctgctacttgcgaggctgagatgggaggatcggttgagcctgggaggttgaagctgcagtgagaggagatcatgccattgcactccagcctgggcgacagagtgagactctgtctgcgggggggataaaaaaggtctgatcagattatctggaagggatgtgaaaaaccctgtggccctaactctacaaataataccaacttaacattttctccagtcacagccattctgtgcaattaacctttgagtcagtggctgtgaatctatactcaacacattcttaccttagagacggctgcttgccctgacctcggaggtgggcaggttttaggccagtaaagtaggcctccaatttacgatggattgacttaaaatttttcaactttatgttgggtttatcagaggtaaccccattgtaagtcgaggagctccctttgatttgtaacagtttctcctgaacacagatccctttcgtaccatggtaaagttgagaaattttaagtcgaataattgtaaaatgggaccagtggctgtgttaaatgcatttgatattttctactcccagtggggctgcattctaataaacccatcataagttgaggagcatctgtcttcttgttgctggggtttcaagttggtggaatttggtggtagtgacagcagatttttagttctcttgtgtgtttagcacaggctcactctgccagcaagttttgaaaactgctgctaccaccttcgttcacatccgcagaggaacatttttccttgttgctcaagtgtggctggagaaagtaggagagtggtgaactgaattcttggtttgaaggcatcgattgaattggttccgtcactctcgagacctgtgctgttctcaggacttgcgtatcattgacggaacacctgaacttcattttctgtcttctcatgtagtgtccctgggtttgccgagggttcatgcccaccccgttcagtggtggttctttcagaggattctgtagtcagctcctttcctagggttctcttatagccactctaacccagggagagtttgctggtgtgtttggtgtttttgtttttgtttttttgagatggagtctcactctgtcgctcaggctggagtgcagtggcgcaatctcggctcactgcttgaacctccgcctcctgggttcaagcgattctcctgcctcagcctcccgagtagttaggattacagacacccataactttgcctggctaatttttgtatttttagtagagatggggtttcgtcatgttggtcaggctggtctcgaactcctgacctcagatgatccacccaccttggcctcccaaagtactgggattacaggtgtaaaccaccgtgcctggctgtgtttgatgtttttattaatacgttcgtttgatgaactgacctcggtagtttgtatgtgggccatctgtctcctgcctcccttccccaaacttttggtcaagtttttagtgttgagtctttttgttgttgtctcttttctgactgtacaagcaacatttcctgatgccgaagtctggggagggggtgggagcctcagatgttggtggtaggagttgcctggtctgcttttgaagttttcttgggcaagtatattaacatatactgagtataggttcaaatgtaattgcagtcttattgttagtttgtatctgtcaggttataggattagaaatataactatttttgggagttgggtagcagacaaactgaggattctacctgggactttcttctgtgtactgtgctctgctgaacccaacactgggcacaaacaggaaactgaggctcaagcggaggaggagtggcctgcccaaggttgacttgcagaaggaatgaggatatatccctgttttctcctggaattagactttcagatctctgttgttcttactgatgtctttgtggcttggtgaattttgttttagcttccttcttactttatttatgtaggtccattggtcagtttccttcctcagggccttgtctttttttttttttttttttttttttgaaacagagtcttgctccattgtccagtctggagggcagtggtgcaatctcggctcactgcaacctctgcatcacggttcaagcgattcttgtgcctcatcctcccaagtagctgggattacaggcgcacgccaccacgcccagctctttttttttttttgtagagatggggttttaccatgttggccaagctggtcttgaactcctggcctcaagtgatttgcccaccttggcctcccaaagtgctaggattacaggtgtgagccaccacaccctgccccctttttttttttttttttttttttgagtcctgaggtcattttgggtgtctgtagggtgaggatggggcaggacatggggagggagaacttagggctgcctctggtttctcagggcagccttaaaaaaaaactatagtggccaagtgtagtggctcaggtaaccttagctctttgggaggctgaggtgggaggattgcttgaggctaggagtttgagattggcctggacaacatagtgagacctgcccccgcccccctccccccaaaaaaaccccaaaaaactgtagtagtgttgagtaggtgatgtctttactttttttttttttatgttttttagacggagttttgctcttgttgcccaggctagagtgcaatggcatgatctcagctcactgcaacctccgcctcctgggttcaaacaattcacctgcctcagcttcccgagtagctgggattacaggcatgtgtcaccatacccagctaattttgtatttttagtagagacagggtttcttctccatgttggtcaggctggtcttgaactcgcgacttcaggtgatctgcccgctttggcctcccaaagccctgggattacagacgtgagccaccacgcccagccttttttttttttggagatggagtctcactctgttgcccaggctggaatgcagtggcacaatcttggctcactgtaacctccgcttcccagattcaagcgattctcctgccccagcctcccaagtagctgcgattacaggcgtgcgccaccatgccgggctaatatttttttttttttttttttttgagacagtctcactttgtcaccaggctggagggcagtggcatgttcttggctcactgcaacttctgcttcctcggttcaagcaattctcctgcctcagcctcccaagtagctgggactacaggcacatgccaccacgcctagctaatttttgtatttttggtagagacagggtatcaccatgttggccaggatggtcttgatcccttgacctcgtgatccacccaccttggcctcccccaaagttggaattgcaggcatgagccaccacgcccggccgactttacattttaagagcataaaactacttttccctgtatggttttttttcccccccaagagacatggttttgctctgtcacccaggctagagtgcagaggctcatgatcacaatcactatagcctcgacctcctggacttaagccatcctcccaccttagtctcctaaagcactgggattacaggtccccatctattataagatgtaattgcacttaatttgtagacatccttcaagtgatatgtgggtgaccatttaaagatacaaaaaaggagcacatggaaatgggaggagccaactaaatatcaggtcctgcactgggctccagtggttgactgtgttagtcccgggcaagagcgagggccttaacactgccaaggatgctggatgagacctggttaaggaaattgaacatgttttgttcagatgagagatgatttggggtgggggtggtggcaggttccggaaggccccaggatcttggctcaagactggactgaaggcctttcctgatgctggcaccaggcaggcttgctcactcccttgggaaatacagagggggttactcttactttccagagatgagatcaggtgaccctattgcaaaaggcagcagaagtggacagtggctacctggggaaggagctcagcattgagtgagcagctcagaatcttacactcaccttctatgaagtttaagatgaagggagctgctctactctgttgccttggtttattgcattagggaaaagaatacttaaattgcttggaaaaattggagtagttttgagctgtttagccagtcttctgagtttgtaaactactcttggttgtttttttttttaaactttttttttgttttgaggcggagtttcgctcttgttgcccaggccagagtgcaatggctctatcttggctcactgcaaccttgtctccagggtccaagcgattctcctgcctcaacctcccaagtagctgggattacaggcatgcaccaccatgcctggctaatttttgtatttttagtagagacagggtttcaccatgttggccaggctggtctcgaacttctgacctctggtaatctgcctgcctcggcctcccaaagtgctgggattacaggtgtgagccaccgtgcccggcctaaaacttattttttaaagttaatccgttgacattttagagcttaagctgcttcggcagataccctgtggaatgaaatgcagctgggctttgcatcaccacacagtgaagtgactggtgtaggagatgtgttgctggctgtaggattctctaagcagagcttcttagttggtgggctgggatgagtgacaggggtgcagacgtccttgtgggtaagtggcccctgcccttgaccagctccttaggctgagaatagcctcatcttactccagtgtcttccacacttagaattcttactacatggcagaagctgaaaaagatggggcatctgattacccccccacccactattctgagaagagagatgatttttcttggctctctcagtctcagggtatccacagctcctgtggagaaggggttcctctgcacgctgcactagaggagtgttgggtgcggggggtggagttggccattcaccctcctggacctcaggatttatggaaagtcatactgggaactaagggcgaaagcacaggttgctgtggttattgttgatgtcctgaaacaggagactgttcatacttcactctcaaaatatggagagccctcagaggtttctgagcatgacaatatcgacttgaattgggcagaagaaaggccattgataaaaggcaggcatgagctaatatggccttggatttgcctgacggaataaaaagcagggacaggtgccagagacactgcaggaagattgggtagggattaactggataccaagggctgaggacagttcatctgtttgacaactgttggagtgccttccctgctcgaccagtgctgagccccaggggtgtctggttgtgagggagattcctgccttccggggtcttagagcctcgtgggggaaacagggcagggtgtcatgatgcagacatctggggcactcagctaaagggcgggcaggagcggtgtcgtagcagtggcagctgaatgacgactggagggtgacataggccctcagattgtggatctttggttttaggggtagtgagctaggtcctggagggtgctctgggacagctgggtattggccctgggcagtcattgtcagctgtgatggccgaggatgcagtgggtgaggtgtggaggccccatgtgaccatcaggaccttcatgaatgaagagagcatggctctctgaccccatctgactggccagctccaggggcaggtgtagaatttgatccgtcctcgtgtgtccccctctccaaactgtagtgctttgtgttaggtgaaagtgtgacaagtaatagttgaaagaatgaaatatccaagggaccatctccatacattggaaaagtttgttctgctctgttcctatgaatgaaatagcagcagatggatggaagttcgaggaacacagacttgacttagcctgagaaagatctttgtagcagttggaggtatcgggaagaggctcagtgtgaacccagagccctgggagctggttgggaacccacattttctagatttctgaggattttccagcttgaggttttggacacttttccagaaagacccagagcgattaagacacgtctctgaaacaaccacatgaattattctaacagctgctgcttgctggttttaggaagtttccttgtttcatgcactgctcaaatgttttcagattctagctcttttggcagagtttgggggagaagacaggtgggtgtcccgctgtgacactggttttgagagtggggaggggttgtggtcgccggaaggaaaagagccctggggatttgccacttgggtaaaaatgacttggtatctgactagtaatcaccaagacccaaacagggtcattttggggtggaagtgaagtatcagatgagttaggtgggagtgggctgggatgtactctggctactgcccactccaaaaggcctcctagctgggcctgggctgtctctcagggcctgtaccctccaccatccttgaattcagtggccagggaacccgtcccctccccctggtctgtgcctgctctgctcattgcctcacatgtgtgagcactcggtggaaggaggaagggatgtctgcacacactccctgtcgagggaccctggcttgctcctgtggtgccctaagcatgtagttggcatgcatgtgtgtcacaatgaaaatgaagatgagaattggtcctagtttatgacccaggccgggtagtatttgtcgatccttccagccccttcctgcatctcgtacactggcagacagggactcagaggccaggtggctgttcctgcccatggaactctgagggtttccatgccttctacagctgggctcagtcctgggagtttctagcaattcagtagagggttaggttaacgtgcacttagaggaatagaggaatcctgggtctgtaatgatctctacatcttttttttttttttttttttttttaagatggagtcttgttctgtcacccaggctggagtgcagtggtgcaatctcagttcactgcagcctccgcctcccaggttcaggtgattgttgtgcctcagctgctcgaatagctgggattacaggcacaagccaccatgcccagctaatttttgtattttagtagagatggggttttgccatgttggccaggctggtcttgaactcctgacctcaggtgatccgcctgccttggcctcccaaagtgctgagacaggtgtaagtcaccgccctggatgatgcctacctacatctttggtagaggaagttttcccagagccttgggaaggatccagtcctaggaccgtctcaatcagattgttctcaatggtacagcggttcaggtttgagcctgggcctaggaggtggctgacctgggtctggattcccatctgacttattaagtgtgtgaccttgggcaaccatcttgactttttttttttttttttttttttgagacagagtctcactctgtcacccaggctggagtgcagtggtgtgatctcagctcactgcaacctctacttcccaggttcaagcgattctcctgtctcagccccctgagtagctgggattataggcacgcaccactatatccagctagttttttttttttttttttttttttaagtagagacggggtttcaccatgttggccaggctggtctcgaactcctgacctcaggtgatccgcccgcctcggcctcccaaagtgctgggattacaggcgagagccgtcgcgcccagcccatcttgacttttttttttttttttttgatacggggtctcgctctgtcacccaggctggagtgcagtggcgcgatctcggctcactggaagctctgcctcccaggttcccgccattctcctgcctcagcctcccaagtagctgggactacaggcgcccgccaccacgcctggccaattttttttttttttggtatttttagtagagatggggtttcactgtgttagccaggctgatctcgatctcctgacctcgtgatccgcccgccttggcctccgaaagtgctgggattacaggtgtgagccaccgcgaccagccccatcttgactttttttaacctcggttttctcttctgtcaggtgtggatatcggcggtagtcccttgcatgaagtgctgataacagtgtgggttccatcgtgtgaagtgtgggtacgatgacagtccctcgtgtgagtgtgggtatgatgacagtccctcgtatgagtgttggtatgatgacagtacctcgttctgtggttatgaggattaaatgaaatcaggcatgtaacgtgttggcacattgcctggcaccaaataaagaattcagtaattgttagccactgtttcctctttcagtaacaaaacctcttgtcaacatattagagatgattctcttggtgtccccaaagttttcagaagtgcgcttttctctagcagtttgaatccaggtgcctagcggtaactttctccgttgagggtcaggtcctccccatcctgcctcagcaatgcccgacggacaatgggggaggcctggactgtgaggatgcacgagcagtcccattctggggacagagacaagcagggcctggcttggctgcatgttagtgctggcataggggttaggtagggtctggatctgcttgaggtggcttgagatagagggagggagggccagggaggtgagggcagtaggcctccttggaggaagagaaggctggcccagtgaaagccagttgaatggatgagtgaactaacgcccctgcccctatggccctgcccctcctcaccccttctggcctgtactgtcccttcgcctgtccataccagtttcccagggcatgtcttgcatgtaggttgggttgtctaggcagcgctgtgcttcagtgacactttgtggttgacttgggaccctgaccacactgagagcagcgcgcttctctgggttggatggctgggttctcaaggaccaacggcttagaattgtggagggtggagtgtgtcccggccctgtgtttgtttgcctgcctgctgacatgaagcctgatgtgtgcagccactctactgtgtgcgagggaagaaagacatcctagtccgtgttggacatgggctctgtgtggcagagttcagcctcttgtggggccccgtcttactctgggggtgatgcaggtaaagtctgctgaggacctagcctaaggctgtgtagtctgacagatttcttcagaccttctctctcttttttttttttcttcttttttgagacagagtctcactctgttgcccaggctgggagtgtgcagtggtgcaatcttggctcactgcaacctccaccccctgggttcaagcagttctcctgccccagcctcccacgtagctgggattacaggctcccaccaccatgcccagctaatttttgtatttttggtaaagactagggtttcaccatgttggctaggctgatttcgaactcctaacttcaggtgatctgtcctccttggcctcccaaagtgctgggattacaggcgtgagccactgcacccagccagaccttcttatttttaggcagtgattctagtgaaatttacattgttctttataacatatcagcattttcatactgaagcctcttcccagcaaggaaaacgccatttgaggcagaaacagcaagcatatttcaaggctctgggattgcttgcttcccaccgcaggaggcaggcggtttggcctttgctatctggctcctcttggagcagggttccccaggtgccagcccccaccagcacagtttttctctctgcttgctccctggaagctggctgttgggccacacaagcagaactcctcctagctggcagagccccacgtccacctggcacctgctttccccaagcctcggtgtcccttctgtgacatctaagacttcagggaggcattgcttcctccatcttggcctcagtttatcctgtaagggctggggatagtggtgaggacagttgacagttctgtgaaacactctgaggagcccttgctcttcttgcatcttccaatcatacttttattgtctgatactatacattgtcaaggaggtgtggagtatgtgtacagccttgcatttctctattctttttgtttttgttgtttttttttttttgagatggagtctggctctgtcacccaggctggagtgcagtgacgcgatcttggctcactgcaagctccgcctcccgggttcatgccactcttctgcctcagcctcccaagtagctgggactacaggcgcccaccaccacgcccggctaattttttgtatttttagtagagacagggtttcaccgttttagccaggatggtctcgatctcctgaactcatgatctgcccgcctcggcctcctgaagtgctgggattacaggcgtgagccactgcgcccggccttttgtttgtttttgagttaggatttcgttctgtcatccaggctggcgtgcagtggcacaaaaatggctcactggagccttgacttcctggactcaagtgatcttcccacctcaacctcccgagtggctgggattgcaggtgcgcaccaccactcccagctaatttgaaaatattttgtagagacagagtcccattgtattgcctaggctggtctcaaacgcctgggctcaaagcagtcctcctgtctgtctcccaaagtgctgaggttacaggcatgagccaccacacttggcctatttctctcttaattggcgtatgcggtggcggctgagatttgctgatagattttgccattgttatagtttcttcatttatactttgcagcatttcagtcatcacatgatttttgtgatggctgtggtgcgtcatcagtttgccgcagtgatgaagcttctgggactaagaaccagcttgttggcctggttcttgggcaaggccctgagaatcctgggctgaatgcccccctgagctgaccacgtggccttagccagggccattggtgccatggcgtggttagtggatggttccagccaagtctgagaatttaccgaattgactgtttgatttggcagctgatggtcagagaaattgaattctgcctcttagcaaaggaagcttggtggatttctagaattctttgttgtagagggggttggggatggcgtgggcagaatgaatgcgaagtgtgggggcttgaggtctgccaggccctcccacttgccctaaactggacttggaggtgtctggaaggttgtgggtggacagcactgaccttgctgcttggccagttgttccccagccactctggattcggatctaggtggaccctatggtatcctagaaactacctttatgttcttttcttttaagaaacagtgtcttgctctgtcatcctggctggagtgtagttgcatgatcatgggtcactgtaacatttaaactccagggctcaagtgatccttccacctcagcctcccgagtaacttgggactacaggtatgcaccaccacacccagctagtttttaaattttttatagaaacagggtctcactgttttctagggctggtcttaaactcttgggctcaagtgatcctcccacctcagcgtcccaaagggctgggattacaggcatgagccactgcatgtggctttgtaagtttttgttgttgtttttgatacagggtcttgctctgtcgtccaggctagagtgcagtggcgtgatattggctcactgtatcctccacctcccaggctcaagtgattctcctgcttcagcgtcctgagtagctgtgaccataggcatgagccagcatgcccagctaatttttgtattttttgtaaagacggagttttgctattttgcccaggctggtcttgaactcctgagatcaagaggtctgcccccctcagcctcccaaagcgctgggattacaggtgtgagacactgcgcctgacctccactgagtttttaaattttttgtagagatgggggtctctctctgttgctcaggctggtctcgaactcctggcctcaagtgatcctcctgcctcggcctcccaaaatgctgggattacaggcatgagccatcatgcctggcctggcgctttacttttgaccatgtgacacacctgtggttggggtctggggcctcagaggcagcgactgtgctgtgcattggtgaaggaagcatcctcacctttccaggaggttgcccatatgacaggttaggtgttgttcctgcttgaaaaacaaacttgagctgggtgtggtggcttgtgcctgtaatcccagcactttgggaggctgaggcaggatgattacttgaagctaggagtttgagaccatcctgggcaacatagtgagatcccatctctacaaaaaataaaaaaggtgtggtgcagtcattgacacctataatcccagcccttttggaggccaaagtaggaggattgcttgaggccaagagttcaagactagcctgtgcaacaataaaaaaaaaaaaaaaacccaaacttgagaaaacttgccataagaatagaataactggaggttttatttcttggcattaagtgaacaaaacccagccactgaccgtaaaggtaatacaattagttgaaatattgcagtgtggggaggctatttgggtggcaatttgttggggacaaggctggctgtcattagaaccttctgtgtgcattctcctatgatggaggcagtgtcttctgccagatggagccttttgggatcctcccaaatttttttattttgactggtcctggccattcggctgttccctcccctcccctttattagagtcatcccaagaggactctgtgctttgtggtcacaggtcacacaggtgcatgtgcaaaggagatggcctgtttagaggtgaatgaggtgggagcaccagatagttgtttaccccctttccccttactctattcaggagcacttgaccaagccataattagcatgctttgcacatttccaatctgaaatgattggcaaagaaatgcccgctctcttgttccagttgggtacctcaggcggggtcactgggcattttgtttttcacccagcatctgtggactcagccacacaccggcctggcagacagctccccagtgcagcaactcccatgggcccaagggattataggcaggcttggagctcagaacttgacaggggacatagtggttttctttttcttttcttttctttttttttttttagacaaggtctggctctgtcgcccaggctggactgcagtggctcagtgtctgctcactgcatcctccacctcctgggcttaaggcatcttcccatgtcagcctctagcgtagctgggactacaggtgctccgccacgcctggctaatttttgtattttttgtagggatggtgttttgctatgttgtccaggctggtctcgaacttgtaagctcacgcaatccatccacctcggcctcccaaagtgctgggattacaggcatgaaccactgcacctggcccctgcagacatagtggttttctttttaatgatgttaattagtaggggcactatgggtgggttgtctggagtttcccttgtctagagttagatgtgatgggagctcagggctcatacccagccgtgggtccatataagtcttcgtgtgtctagcttgggtgctccaggaagtgtatttgggatgtctctggcttctattccacaaacttagaggagaagtttgtacccaagatgagctagtcatctccattcacacaacaagcattccttggcttatggctgtgagacaaggctagagtccccgggaggtactgttcttctgcagctaagagctgggatcaggccggcagacttgtccatctatgacataatgtgtggccgctgctgttacctcaccattccatgtgtttccagtgctttttaatttaatttttatttttttgagatagaatcttgctcttttgcccaggctggaatacagagatgcgatcttggctcactgcagcctccgcctcctgggttccagtgattcttgtgcctcagcctcccgagtagctgagactacaggcacacacccctacccctggcaaattttttttgtatttttaatggagatggggtttcaccatgttgcacaggcaggtctcgaacttctggccgcaagcgatccacccgcctcaacctcccaaagtgctgggattacaggcgtgagccactgcccccggcctccagtgctttctttatgcggcttatttgagaagcggagggaaggactagttggtagtgaagcatgtcagtggcatggctgagctggggagcagagtttcagaaccatgctttgtttggcaccatgggtataccaggctcatgtgctttttttctgtacacgctttggcatgtgatgtgtgtggctctgccttgaggacattatgctgagtaagagaagtcaggctcaaaaagacacacttatgattgcacctatatgaggttcctagactctcaaattcttaaagacagaaggaagaaggggggttgccaggggttgggggcagagagatgagagtgagtatttaatggggatagagtttcagctggggaagatggtaagttctggagatggatggatgatggttgcacaacagtgtgactgcacctaatgccactgaactgtgaactcaaaatggttaagatgtaaattttgtgtacgttttaccacaataaaaaaatgaacctttctgaattcagaaatattctatacctttatgacaacatgtattctgtcctctcagaattagcttggggacaaagggacaaaggcacacacactcatttcctagcttgtgctaagtactgggggtgggggtggggttaaaaaaatgcacgtggttctagaaggctcttaatgacatcatcttgggatcacaatgttagagtgcggatattctatgggttttcttcagtccctggacaggtggggtcatcctaggacccctgcaatctttaggggatttagggagaaacagtgtccaggaacatctgaggtctctgttcccgtgcattgcttggggattgaaggtatttctttctttctttctttttttctttttagatggagtcttattctgtcgccaggctggagtgcagtggtatgatcttggctcactgcagcctccgcctcccaggttcaagcgattctcctgcctcagcctgctgagtagctgcgactacaggcgtgcgtcaccacacccagctaatttttgtatttttaatagggacatttttagtatttttagggttttaccatgttggccaggatggactcgatctcctgacctcatgatccacctgcctcagcctctcaaagtgctgggactacaggtgtgagccaccgtacccagcctcgaaggtattttttattttcctatatctgtttgtcagtgagtttcctttaatacagcagtgtgttggtatttttattttatttttatttcgagaccagttcctagatcctcagtattagagaagtcatttcctcttttgttcttgtgacattttcttctggtgtcctttaatactgcaatacatcaggcatctgaaatactaaacacttaaatgtttcagacacttcctaaggcctcagtgtcatctgcacgtagacatttggtttctgggcacttaagatctggggtcgataggcagtttaggactgctgcatgcactgcccaggcagctgctgggagcctgggtggaaacaataagaggagcatccagatagaggtagcaatgttttgaggaacaacattaatcataataataaaagaaagaagtagttgcttctgtttgagaagctgcctggtgccagggcctgtcactgggttctcaggatggtctggaggcctgaggtaggttccacgcaggcaggcaggctccccgggagggcattgggcccactgtttaactgccaggtgagccaggctgggcagaatgtgctaggaggaagctcgtgagcatttgggatggtttggagggaggcctggagtgccagggagcgagaggggtgtggtgctggagtctgagcttaccagagggcagggctctggacccgcatgagaactgtgaatggggttttagggtgggacacagcctctgccataagaaaggatacggggagtgcagagtgtgggcaccactgacactggggcaactctcaattctcagtggtggcctgagggaagcccttcagacacagggtccccacagctccccaaatagcatgccaggggtggggcaggagggggacattggccgcgccccgaagctctggactcaccccaggggctgtgccgtgcccatggctgtagtcttgcctatctccatgtggcttcttcctggcactgattaactattttaattaaagacagcatttgtatgttttttttttttttttgcctccagccggtggtagaaacctcttggttgggtcctgacaactcgtggaggtccccattttgtagtctcctcctccgtgcccacgtgggtgttagatgaggtgatgcgcaagcgccttgtgtccatggagcatggagcctttgggaagtgggatgctcgatttcaagtagcaagtttcagcaaaaagttccagcatcgtggtccatggtgaggggctgggggggagagcttgcctgagtaacaggtgcttgaacccaaaggatgggtgggagctaggaggggctctcctggccatgggaacggtgcgtgcaaaggtctggcacggggagtaggcaggcgtgctgggtctgaggaattgaaaggaggccaggtggttggagcgggagcatggaacgtgtatgctccttcacatgcacgtagcgcacttgcggctgaagtgggccgggccttgaaggccgtggtgaggtgctctgacgctgggtggacctgggaaattaaggagggccgtctggtttattatggggagtagaagatggtggaagtggaagacagccagtacatgccttaggctgccggcctgcccctgcctgtctcctccttcaaggaggctgtggttcccatggctgagggaggagacaggcaggggcagaccaggggcctacaacatgtactggctgtcaccctaatgggaagctcagtttgagagcagaggtgggaactccggcctccagtgccagctctggttgccaaggatgggcttgtgtggccaacctcacgattgggtcttggtcctcccggggctgattctccgcatctctagtctgccaagtcatactcttccccacagagggttgatggggctctgtgccttggggagagcggggactgctcagggaccgacctgaacacctcctcaatgtgcctctcccctgacttcttggcggcagcttgctgctgtggctagggctacctctgtctttttactgagtagctcattgggcagtttcctcctgatcccccttcaaatctcagtattgggatttgggccttatggtctctgttgttaaaggtggaaacagccatagacagtgtgttcttgagtactgacatggctgtttcccagaaatacattatttactaaggtggcaggcagtagtgtgctgaccccagactggaaaactggatctgtggcccctgctaattcttctccagccagccagccagcgcatggtagaccagcctgacttctgggcttcctcaggatgatctgctgttgccttgcttcagttttttctttccagattgagctggggacttccccacattgaaagtttgatgggaccattagcaaagagggtctgggtgaccctgtgaagggggcattcagtttgtgcaggacctaggagaggggcgggagaaggtgaacggtgttgttgggtttcaccttggatgttgttggccatgtcatgttcccaggattggactggagccaagctgtgtttggatgcagaactagttgaaaaattctagagacagcacaagtttttggtgactacagatggtgataggtcagtgggtctgggcccagggaagggacaacggggcttcctaggggcacctggtagagcccatgcttccggatcaggtgctgacagctgcagagacaccatcactgtaccagccatgggtgccgcaaccccagcaaccccatggaaccggagttccccaggtagtggccagtgtcaggccatgtgtcctttcctcaaattaaaaggacctcgctagcctgagcttgagaggataaaatggcaagaaaggacttctgttgcccaaagtgcagtgacttgatttcatgtaaattgccatagctaccttctcaccaaggctgatcttccctcagtttgagaagtccttgtgtttgggtgggttgtatggtaggggtgtggtgtgtgtgtgtgtgtgtgtgtgtgtgtgtgtgtgtgtagtacccaggtgcaaggtcaaagccaaaccataatgatttatcaagggagcggaagagtctcttatgagctggtaattgtgcacttaagggttacttgatactgctttaaatgtatgggttggagataaaaacagtaaaagctctctgaactcagccagtacggggtggatggcaaaacagtccaaatgatagattagtggaaagcgattacagtgtattttcaagaaatgctgctagttgtgatcatgctgagtggtcttctgcttggtttcctcctctgtgaatcttgcactgattgtattgcagggctcctgcagtgggctcctcagatcggccccttctccttcagggttaaactatccctgctcgtccattcaataaatatttattaagcggctgggcgcggtggctcacacctgtaatcccagcacttcgggaggctgaggcaggtggaacacaacgtaaggagttcaagaccagtgtggccagtatggtgaaaccccgtctctaataaaaatataaaaattagctgggcgtggtggtgcgtgcctgtagtcccagctgctcgggaggctgaggcaggagaattgtttgaacccaggaggcagaggttgcagtgagccgagatcgcaccactgcactccagcctgagcaacagaccaagacttggtctcaaaaaaaaaaaaaaaaaaatttactaagcaccacttatgtgtcagacactgttgtaggtgcttgaactaaaatcgggcatcaggcagatacccctgcccttgtggtgtgtacgttattgctgggtgagaaagttcatcggcaacacagtagctgtgttgtgtggagtgtgggaggggtggtgctgtggaagaagaggagcagggtcgggatggtgggcctctgtgaggagacatttgagcaaaggcaggggtggtgggggatcacacggaggggttaattttttatttttatttattttgagatggagtttcactcttgttgctgaggctggagcgcaatggtgcgatctcagctcaccacaacctccatctcccgggttcaagtgattctcgtgcctcagcctcccgagcagctgggattacaagcatgtgccaccacggttggctaattttgtatttttaatagggacagggtttcttcatggtgtccaggctggtcttgagctcctgatctcaggtgatctacctgcctccatttcccaaaatgctgggattacagacgtgagccactgtgcttgacagtggtttttgttttgttttgtttttgtttttgtttttgttttttgagatggagttttgctcttgttgcccaggctggagtgcagtggctcaatttcagctcactgcaacctctgcctcccaggttcaagcgattctcctgcctcaccctcccaagtggctgggattacaggcatatgccatcatgcccggctaattttgtatttttagtagagacgaggtttcgccatgttggccaggatggtttcgaacccctgacctcaagtgatccaccccgcctcagcctcccaaagtgctgggattacaggcatgagctaccgtgttcggctgacagtcgttttttaaaggtcgttttcaattcgggatgcagattgaatagttaattgatagatgaaatgacagaactaggattttgtttaaaacataaaaagacctcaaagtggggagggtcctagtgtgttggaggcacggccaggaggccagtatggctggaacagagtgagcaggctgaagtggggatgggatgcttgggtctgcaggcagtgtgtgggcctctggggttaggagaggatgggcttcactctgagtgaactttgagtccacgagtgaaagcagagaatatagtttggagacctccatcccagtagaggacagtgtggccagtggaggtgtgaggagtggttgggctccagatatatttaatggcagaaccaacaggctttcctgagtgactgggtggtgggtggagtctgcccaaggggacaactccaaattttaattgctgggagaatggatttgccacaagctggctttgaaagcagtggtagagtgtgaaagaagttaccttaagacttcttgccagttgcactgtaggtacgatgtactgtttgttgtgatttgactttcctccaccacccccctgccccaggaagatgtgatcttgtgcatcttgtgttcacgcagagtagggtagttggatctttgtcaagtctcagtgatccacatgcgtgcatctattttgtcagtctgcttgtctttgtatccatgtcatactgtcttgatgtagctttatgttaagtctcaaaatcagttgtggtaagtcctccaaatttgtgcctgtttttccatgttgttttcgttattctaggtccgttgcacttccgtgtagattttggaatcagtttgtcatttcttcaaaccatctgctgggaatttttgattgagattgcattgaatctgtagatcagtttgggagagaattgataccttctgacccatgaacaagacacatgtcttcatatacttcagttttctttttttttgttttgagataaaacagtattttacacaagtgaggctattgtgattgattcatgcaaacaacaactttagaaacatcttttaaacatgttcagagagtgtataacatacaacagaaattgatgaaaagtgtaacactaaaataaaattattctcatttattactgcaaggagtacctccccataccccccctttttttgagacaaggtcttgctctgttgcccaggcaggaatgcagtggcacagtcacggctcactgcagcctcctgggctcaggtgatcctcccacctcaacctgagaagtagctgggacctcaggtgcacgccaccacacccagctaattttcaaaaattttttttgtagagatggggttttgccatattggccaggctggccttgaactcctgagctcaattgatctgcctgccatggcctcccaaagtgctgtaattagaggcatgagccactgtgcccggccttctttcatttttcttgttgtttcattgtagtttctttatccttaagtatttcaccttttttgtgctaatgtagatgacttttttcaggttttgagttctgattggtttgtgcctgtgtgtagaaacacagctgattttttatatatagaccttgatcctgcagcagaacagcacaggacacctgcttctgaggcttcccaccctcggggcagagaggtcttggattggcagatacaaaatagttaggactaatgctgcccattgggtttctcagcttgaatggggctaaaaagagcggcagaaagggttcttcctgaggagctagccctgtgcctcatttaggaggtgcctaaaggtctttccatagagttcactggtgttgtcccctatccttatttttgcaagttctcctgtgggagtgtttctcgccatccatcagctgtgaattgccgtgaacctagtttaaaaataaaggtttcatatcagagcaagctcctggtagtcctgtgggtgcaaagaatgacaacagaggtgatgttgacactatttggcaagctacaactgacagaactgcttgggaatctgggatttggctggttcctaaggttcagcctctggcccatagccctggacgtctgatgatacaaaccggaagtggaagtccgaggcattttctctatgaccttggaagagaagttcctgaatattgtagagcattagttttcctgtctgtaagacaggcagcctctttctctctggacagcatcccatggggatgaccatgacctttggttttggaggtgaagccctctcggtctggagggtgaagtccgctcattcccaggcacatcatgccctcatcttgagggtaaacctagcactgccttcaccaggaatggtggctggtttccctggggtccatgacagacaacatgatggtgaggaggttacattgggagaatgagccctgcgtgctgcctgtgtgctctgtgaccctgggcaagttcctgaagatcagacacatcagatcccttatctgtaaaatgggcatgatccaggaacctgcctctacggttgccttggggattcagagatgctgtgtgagcatagtacctggaacatactcctaagtacctattaaatgctaggtttctgggttgttttttgagacagggtctcactctgtcgcccaggttggagtgcagtggtgtgggatcttggctcactgcagccttaacctccctggcttaggtgatactcccacctcagcctcccaagtagatgggaccacaggcacacgccaccacacctggctaatttttgtatttttttgtagagacagagtttcaccatgttgcccgggcttgtctcaaactgctaggctcaagcagtcctcctgccttggcctcccaaagtgttgggactacaggcgtgagccactgtgcctggcctgtttctgtttttaatgtcattactattataataaaaaccctgggctgggcacggtggctcatgcctgtaatcctagcactttgggaggtcgaggtgggtgtatcgcctgaggtcaggagtttgagaccagcctggccaacatggcaaaaccccgtctctactaaaaatacaaaaatcagccgggcatagtggtgggtgcctgtagtcccagctactcgagaggctgaggcaggagaatcgtgtgaacccaggggtcagaggttgcagtgagccgagatcgtgccacttcactccagtctgggcataagataaaaataattgtatttcatcgtgtgactgctttttatgtcaccatctgtattggtgaagacagtgtctgggacgttggcgttcattggttagcactgtattgtttcatacctcagagatcagtagaaatttgtttcctccgactgtccccattgtggaaggtagctgaggcaaaactcaggaaatctgaaattttgctatgtaattccaggggttagagacattttagaaatgccagtatgttccagaaaccttgcttggaaacacagtgtttctttctctgtcctttgctttaggttggtcagcacattgtctcaagtagccttttgatgtcactgtggccatggccaactggtaggaccagcaccccataccccgaagccaggtgagtgcttggggtgtagtgtctgtggaaggaaggttccacgcatccagcaggcttcggtcagcttcttggacactttaaagtgagtgctgcttcagccacctcctagagaagatggagggaggcaggccccctgggatcgcacactgtgcagtctgtatggggctgcctggcccgtcccttcaggcctcagggaaaaagaaaccattctgattggtcattcatttgaaaaccctaggtctaaataagatgagcctgtcctctctgaggggcaggggcagaggataatcctggccagtggcctttgccctctggccattcccatgatttcccagcagtgatagatgccgttagactttttccttattcaccgcaaagcccagggccccacactggttcttggagctggttgcccttaccttgcctcgtgcctcatggcaaagctaagctgcccccgctgcgtggagctcttaggcagagactgtcaagagctgtaccagggcattgctgggtaccttggattttctctgttaccatcaagcctggtcagcgacgttttggcccaaggctacctacctggagaagaacgcagaactgaaagatgtcttagaacttggaggcagcccctgggtcagctgctccgttttatagatggggacacacatgggccagagttggcaggtgacttgcctagggattcatgccccatcgaacaggatcttgccggtcacgcagtgtgagatgtggctgctctgctgaccatggcacagaacaagtgttgcggtcagttttgtgaggtttcagctcttcatatggcaagaaaatatgggcatagtcaggtaattctgttgtcaggaaaacatttccagaatgttctccaaacaaaatgaaactttcgtggtacttatatttttattttttatgttttgagacagggtctcactctgtcacccaggctggagtgtaatggcatgatcatagctcactgcagcctcaaactcctgggctcaagcgatcctccccgcctcaggctcctgaatagctgggaatacaggcgtgtgcaaccacacccagctaatttttgtattttttgtagagacggagtttgctgtgttgcccaagctggtcttgaactcttgggctcaagcgattctcctgctttggcctcccaaagtgttgggcatacaggcaaattacactcaaaaaaattttttgaggtataatttgcataccatacaattcacccatttgaagtgtgcaattcagttttttatatatattcaagagttccacaattaccacctttatttaattccagaacattttcattatcccaaaaggaaacagcatactcattagcagtcactcctcatctccccctcccctttctactgatgacctctaatctactttctgttgatttgcctgttgtggacatttattgtaaatggactcttatacttgtgtaagtggccttttgcgtctgccttctgttagcgtggttcatccacattgtaagcatgaatcagtgcttctttcctttttatggctgaatgatattccattatatggatgaaccacattttgtttatccattcattcattgatggacatttgagttgtttctacttttttagttattgtgaatagtgctgcttttaacattcgtgtacaagcttttgtttgaatgcctgtgttgcgttcttcttagtatatacttaggggtgcagttactggatcatatggtaactttctgttaatctcttttcaggaattaccagactgttatccatggcgcctgcactattttacattccctgacacttacacagggctctcaaactctttggagacaagttcagactcaaagtctgtgccagtttcctacagagagttgagacttgtcagagcctattacctggtgctgttgtgctgtaactactatttgggggatgtcaggcattgacagaaacagagggtaggactagggactcagagtcacaaagccacatggctctcatcatgttggctcacctcctttttggagataggctctcgctctgtcacccaggctggagtgcagtggtgtgttcatggctcactgcagcctcaacatcctgggctcaagtgatctacctcagtctcccaaatagctgggactgccaggtgtgggccactgtgcccagcttgagctcaccccctttgttgagggggaagcacccacagccagcccagggaagtgagtgactgcctcttgtcctgcagcccagggcattgtttgagggcagcagggctggctgtagtttctcctaggccccaggctgggtacccacccctctgcctggccctttcttaactcagaagcacatggtctgagcagtaggtacttgttcaatgaataaatgaatggaggaaacctccctcttctctgttgccagccagcagggaagacccagccatagcattcaggcagtcagtttgggagttcagaagggaatttccagaggccaccccaggttttcctttggcctgtgcttgaagggacttgatagaaaaggacagtctataaacagtcgtggcacatgatacttagtggtcaaataggcggaagccacccccgaataattatttcttcaggacttataaatgtgtcagcttgtgtgcactttttgttgtgggtgtgtaagacagcccagcatattgatagattttaggttttctccacaaaatgcaagtttcacccactcttgggtgtgtctcactcagcactagcccacacttgctttaagtggaaattatggactgtgattggctggggtgtccccattcctgtcacccaggaccacatgagcacagtggagggagcagggccggaggagggctggccctcaatgtgcccagcagctccctcccatgtctgaggcacacagtctacacacaactcccacttgtgtgtacatttattcttatgggcacaggggcagtcttgcctgttcatggacttggtgtctgcccttgaatttggcctgtcaggtcctctttgttaagcaggcacgcactgcctagtgctgggtgttaaggatcaaaaaatgggtgtgactgtagaaaaacagattgcatcacaggacaggtaatgcacatgggcctggaccaaggtgtgaatgatgctcagtctttctaatataagaatcctgcacgttggagcaccaccaagacatttctgggttggcaagcacatggagtagacactgttctagtgatgggagtcaggtagtgccgtggtagttgcttttggaattcacaacttctctcaggggtatttgcaacatctagcaaaaggacaagtggtcaggtgcggtggctcactcctgtaatcccagcactttgggaggctgaagcgggtgggtcatttgaggttaggagttcgagaccagcatggccaacatggtgaaaccccatctttactaaaagtacaaaattagctgggtgtggtgatgcacgcttgtaatcacagttacccggggaggctgaggcaggagaatcgcttgaacccaggaggcggaggttgcagtgagccaagatcacgccactgcactccagcatgggtgacaaagtgagaccgtatctcaaaaaacaaacaaacaaaaaacacaaaaaagcaaaaagacatgtgtttactctttgctccagcaaatccacttctggaaatgtatccgaaacatggtcagaaataaggaaggattacaaggattgtgttcattacaacactccggaaacaaacaaagctgggaatgacttagatgtgtcagtgttcagactgggcaacttgtggtggtggctctgcctacagggtggtgcctgagcccctgagtgaagggaggaaggagtaggtgatgtcttcatttgtggtggtgatgggatttctagttgaaatgacaagcagaaaaaagaacaatgtaaaggaagaagagatggagtgtgctgtcacttatctaaggaaaggtggggggatttgctcattttatttttatttttatttattttttatttttatttatttattttttttgagatggagtcttgctctgtcgcccaggctggagtggagtggcgcgatctcagctcattgcaatctccgcctaccaggttcatgccattcttctgcctcagcctcccgagtagctgggactacaggcgcccgccaccacgccctgctaattttttatatttttagtagagatggggtttcaccatggtctcgatctcctcacctcgtggtctgcccaccttggcctcccaaagtgctgggataacaagtgtgagccaccgtgcccagccactcattttatttttatacaccataaaggaaccacattgtcacctccaggagaagggatggagagggcactgggagactttttcacgtgtcctttctttgtagcatcatgtacgtgcttcacataattataaaacaaaagccaagtggtggcagtggaaggggaagcaatcccttaaaaaccaaagacaaaaatgaatgaatctaggtacatgtcagttgtaacacacattggtgacttaacctctcagaacttatttctgataactttaaaacgtagtttgactgtaaatgttttagcgagatacccaataaaggtaaacaaatttatttccttctttccttcccttcctttccttccttccctttccttccttttcttccttccctttccttccttttcttccttccctttccttcctttccttcctttccttcccttccttcccttccttcccttccttcccttccttctttccttcccttccttccgttccttccctcccctcactctgtcacccaggctggagtgcagtggtgcgatctcggctcactgcaacctccgccttcacgtttcaagtgattctcctgcttcagcctcccgagtagttgggattacaggcgcccgccaccatgcccggctaaaaacaactttcttaaaatcttcagctgttttttggaatcctggttttggtttcagggtaacaatattagcattattcctgttatatattgtaggagaaaataagtaagtaatgtcattaagaaccaaaattttccacacaaaaggaaaatgcaataaaaacccaaagcactagcttttttatttttatttttatttttgggcagggtcttgctctgccacctaggctggagtgcagtggtgtgatcatagctcactgcagcctccagcagtccttccacctcagcctcccaagtagctgggacaacagatgcaccaccatgtccagcaaatttttaaatttgggtttgtttttgtttttgtttttgttttaagacggagtctcgctttgtcacctaggctgaagtgcagtggcgtgatttcggctccttgcaagctccgcctcccaggttcatgccattctcctgcctcagcctccccaacagtagctgggactacaggcgcctgccacaacgcccggctaattttttgtatttttagtagagacggggtttcaccgtgttagccaggatggtctctatctcctgacctcgtgatccacccgccttggcctcccaaagtgctgggattacaggcgtgagccaccgtgcctggcctggtttttgttttttgagacagagtttcactcttgttgcgcaggctggagtgcaatggcacgatctcggctcaccacaacctttgcctcctgggttcaagtgattcttctgcctcagcctcctgagtggctgggattacaggcaagcatcaccatgcctggctaattttgtatttttagtagagatggagtttctccatgttggtcaggctggtctcaaactccaacctcaggtgatcctccagcctcagcctcccaaagtgctgggattacaggcgtgagccactgcacctggccaagacctgaagtactttaagtaaaacgcttaattctcattctgcattgggaacatggtaattgtgtaagacacactggggttgtatcagaaggacccacaggggccctgctggcacagatggggcaagcgagagtgaacaagaacaaggagcccctgagttagatgtgttaaaaatccaaggctggctggatgccgtggctcacacctgtaatcccagcacttcgggaggctgaggcaggtggatcatttgaggtcaggagttcaagaccagcctggccaatatggtgaaaccccgtctctactgaaaatataaaaattagctgggtgatagtgacgcacgcctgtaatcccagctactcgagaggctgaggcaggagaattgcttcagcctgggaggcggaaagttgcagtgagccaagatcgcgccactgcactccagtctgggcaacagagtaagactgtgtctcacaaaaagaaaaacccaagggtttaagctggctgtggttatacgcacctgccatcctagctgttccggaggccaaggccataggattgcctgagctcaggagttggagtctagcctgagcaatgtagcaggaccccccaagctgaaaaaaaaaaaaaaaaacccacagtttcttattggtgcttaaaggacaaggaagaagctcactggtcccctttggtaggagttagagagctagctacccatttaaaaatgggtagagggaaagcaacaggcatttttcctgcatcttctctgtgggctgcacactccaggaacgagagtgtgggcgagggcaaggttccctcgcatggcagtgctggcccgcagaactgcctagggtgacagggatgctctacaccgtctgccctgcgtgccgtttaacatagcatgactgaggacacggagtttaattttgtctatttaaatagccacatgtggctaatgggcagcacagctattgatgtgttttagcaaattaatatgaaatgacagaattttaagtttattgcagtcacctagtgaattgaggggttccagactgtaaggtccagacagtgattctccctagctgctagcccccaaggagagtgtcctgtgcttccacagggacacgcactcaccaagcctcaaggtctagttcatgagaaattgggggtatgtgcacttacgccacagggacgccatttgcaaaaccaacaatgggaaacagggcaagcatcctaactctttgagcatacgattgtgtcagtaaggggacctgtggattccagccagatatgactccaacaaagacggaagattgtgaaattatcaaaggtgggatcatagtgttgtggtcatgcttgttctgtagagataaatactgacccctttagcacaaatgcatgtttcataggatttgcttcgtggaagctagtgggagagagaaggagaaaggagcggcatgtggaggacacgagggtggtccccgatggccgtggacctgggtggtaagcacctgcagttaatcacaccattatctactctgtgggtggatttgaaattttccttaaagaaaagtgtgaaaattgggtttggcccaggtcttttctcagggagcttcgtgactggatcatctagaagaggggaaatggccatttataaaagctgaggtagaggccacttgggggtagtttaggagaccacttgggagtagtttaaattcaagcagaaaaccatgagcagagactggaattgccagaggggaccgtggcctgtcagcccaccagacagcctctcttacacactcttattttctgtaattacaacactcacagctactcttcatggagccctcaggaagtgttagcaataaagtgggtgctgttcccattttacaggtgaggaagctgaggcccttgtgggtgaatcaggctttctggctttgactggacagctaagggcatgagcttctgggcctccttcctgtcgcctccctgctcagtacctggggcacatctgactaccactccagtaccctgactctatgatgaaaaccattctcccctccccattggtattgcccatccacagcagtcgtagcccatcacgagtggataaagtaggtggttagctggacttgcacatgacttgtttcgtgaacagtagtgcttagagttgtgatctagggacccagcgaacagtgtgtgagggacttcaaccctgcctctctccggtatgtgctgtgcctgctgtgccccccactccagtgttctccttggggctcctgaggcagctcccagtaggaggcctatcgttgttggcaccccaagggtgtccctgatccctaagtagaaacttaagcaggtatttggacaaataaatgagtgaaacaccttgtgacgttgaggcctgtggcacttccccaatagtgtgttagtgtaaaaccaccgtgtatgatgcctgttggtcccagcactttgggaggccaaggcatgtggatctcttgggcccaggaatttgagaccaccctaggcaacatggcgagacctcgtctctacaaaaagtacaaaaattagccaggtgtggtggtgcgtgcctttagtcccagctactcaggaagttgaggtgggaggattgcttgagccctggaggttgaggctgcagtgagtcatgattgtggctctgcactccagcctggacaacagagtgagacctcgtcccttaaaaaaaaaaaaaaaaaaagccaccatggcagttttgttttatttggattttaggcagtgtagggcctgtgataaggcctggctgaggtggggctctgctggtagtaactcttgtgattccagccctctgaggccacttcctctttctgccttggctcctccttggtgaattctcccttatgtgtcccacattctcatactcccaggcattggatctttagctgggagatggttctgagttcccatgtgtacagtgggcttgctgcagcctcctgcagttgtcctgtaggactcgtggttggtggtgacatagaggctgcctaccctgatggctgatggctgatggcagtgtggttgtttggggtcttgttgtataaaaggagcatgtttactgaaggacccagttctgtgctgttggggtcacagcaaacctgcttttgcctgttagtattttagtagctctagaggggttcatggctattggaattagtatttttgtttttgttttcttttctcacctctttaaaaaagcatgtaaaattcacatggtagaatattcaccagttttaacgtttttaaagtgtgttgtttagtggcatttaacccattcacagtattgtgcaaccatcacctgtaattctagaacattttcatcacccccaccccaaaagaaaccttgtccccattagcagtcactgccttttccttgactctgctctccaccctcccagcagccacttattctactttctgtctctgggtttgcctcttctggcatttcatataaatgggatcatgcaatatgtggcctttttgtctgactttttttcacttagcatgatgttttcaaagttcagtcacattgtgtcagagtttcattcctttttatggccaaataatattccattgtctagatggaccacattttgtttatccattcatccattgatggacatttgggttgttttctgctttttggctattgtggataatgttgcttttaacattcacctgcacatttttttttgaatacctatattcagctctcttggatatacctacaagtggacttgcaggacactcgggagcatggtgatgccgtgggctggaggccctgcccaggctcatgtgggaactctgcgtttaactttttgaggaactggcagaccgttttccacatcactctactgttttactttccactgttttccacgtcactctaccgttttactttccaccgttttccatgtcactcttaccattttactttgcactatgcagtgtatgagggtcccaatttctctacatccttaccaatacttaattggcttttttgattgtagccatcctagtgggtgtgaagcggtttctcatggtggttttgatttgcatttccctcatgactaatgacactgagacagagtctttttcacatgctcattggtgattcgtctctcttctttggagaaatgtctgttcaagtcttttggctgttttttaattgggttgcttgtctttttgttgctgagttgtaaggatccttcatatgttctggacactagacccttatcaggtgtatgatttgctataattttttcccattctatgggtgtttttttttttattctataatgccctttgcacaaaagattttaattttgatgcagtccaaattatcttttttctttttttgatattgtgcttatatgtaagactgtttgccaaacaccaagtcatgacatttttctcctgtgttttttcttctaagagttttatggatttagctcctaatacttgggtctttcatccattttgagttaattttcatatatggggtgatgtaaagattttgttttgtttttatttttttgtagagacagtctcactatgttgcccaggccgatctcaaactcttggcctcaagcgatcctccctcctcggtcttccaaagtgttgggattacaggcgtgggccactgcatagtgcctggccaggttttgtttggttttgatcattatcttttctgtcaggatgaagacattttggcattaaccgggaaggaggttgaagggcagtggtagttgggagttctgaaagtactatttcaaatctgtttaacaaatgcgtatacattgcttcttctgtgcaaagcattgtgcctgcatgggcccttggatggtagtgctagagaaataggtgtcccttgatatcctgggggtggaagcccacaaacagagaggtgaataaatagcatgtcaagtggtgatgaggcaggaaaggggatagagaccccctggggggcatgtgtggaggggaagcgtttctcactttgcattatcagctgagacctgggggagtggagatgcaaaggccctgaggtgggagtgagccaggatgtcagtgtggctccagctgagagaacaggagaggggttggttggacttgggggacgggcacaggggtggctggattatggtcaggccagcaggaccttctggccagggctttgcttccgtattattaagtatcatgttttaccaaagaagcactgatacagaccccccactcccccacttcatggcacagctgagcttagctgttgcccagaggttggtgtgggtgtctatacacagactcctcccacccctgaggggaagagttccatttgcaaggtagagggtagaagtaggatttctgtcccagcccttacagctgtgcaggaacctgctgcaaggattgtttgtgggtagacccacgggctggggctgcgttgagagcagatagtttgtttcatcatagaagtaggtttccctgctggctgtgatcctccctgtggctctgtgatgctgcaggatgcttgtagggaggagcttgaggaagggcgcctgggcagggcctccagcccacagcgtcaccacgttgctgggtgccctgatgaaaatggcaacagatgaatttttggttccctcactttccacttgacatttccttccaggaactgagaaggcttttctggcccttggaattttctgtgccagacctccctgccgtttccagtctcaggccttgatggagctggtggtcagggccacagcttcgcctggctcagccctgagagactacagccctggaagggttaaggcctcccattttgtgatgtgacgcctgatgggcacgtagcagatggcatggaaatggcaggcgtaacccttcgtaggccacgtaggctcacggtccaggaggcatctgggaggggacagagagccaggcccttcccacagaaggggagcatggccagccctcacagtgacgtcctacagctgggactctggtccccatttacctgtggaggtttaagactgcccggactcccccttcacaggcggcacctttgtttctatgtcgtgtgttccttgggcagcgtctgtttctctctctggggccgcagggttgggcttgggcacaggccctggccaacagcggcgcaggtgtggggccacttcaagcacggcctcaaatgagggcagtgttgggcactgaacagttctgagatgtcacacacagaaaccaagtcctgatctccagtgtgagcacagggagctattggtagttgtgttgtgttgtgttgtgtttttgagacggagtctctctctgtctcccaggctggagtgcagtggcacaatctcggcccactgcaacctccgcctgccgggttcaagcaattctcctgcctcagctttctgggtacctgggattacaggcgcccaccaccatgctggctaatttttaaattttttttgtagagatggggtttcaccacgttggccaggctggtcttgaagtcctgatctcaaatgatccgcccgcctcagcctcctaaagtgcaccgcccctggcctagcagtagttttaaagacacttatttgctacctgtctttctcctcataataagcctgtgatcagtttaggtgtgctttttcctattgtctggtacaacttgggggtgaagacaggctttcatctcgtgttacccggaagggccctcaagctgagacacagggccgatatacagaagcagctaattgtgatccttgtggggctctttcatggccagtgtgtggacactatcgtcccctggttttgggagttttcaggcaatcatctgtgtctctggaagatggcataatccctacaccatcttccctgattaagaactatgcttctccagtttttttcccccagatgacaccagagagggagtttggggtctggggacctgtctgtcccaggctggccctgcacaatagcgtggtgagtctgagtggtgggcacaccatgggagggctgttggctattgggatcagtgatctattttctagagacaacttatgcccaaaacagctttgctctgcacagggtgctggagtgagaggctaccagagctgctctccactgtgcaggcctagtgtgagttacattaggaatttgcagaccatctagatgttatttatttttagagacagggtccaggcggtttcaaactcctgggctcaagcactcctcctgctttggcctccctagtagctggaactacatgcacacatgccacgagacctggaaggttttatttttaaaacgttgatggttacttgggtatatattaatatacctgggtatgtttctgtgatgttttgctctccaggtttactttgttaaatgtatcaaaaaaaaaaaaaaaaatccagcctgggcaacatggttgaaactctgtctctacaaaaattagcccagtatggtggtgcccacctgtgacctcgggaggctaaggtgggaggattgcttcagcccaggaggtcgaagctacagtaagctgtagtcatgccactgcactccatcctgagcaagagagtgagatcctgtctaaaaaacttaataaattgattttaaaaaatattttggaggcatcatttacaagtcctctacctgaaacacatgagattgtaagtgcatttatttgtaaatgggaaagccagaggtgccttttctttttacttccttcattgttttatttatttatcttatattaaaaggtttttttgtagagtcagggtcttgctatgttgcccaggctggtcttgagctcttgtcctcaagagatcctcttgccttgaccttccaaagtgctgggattaacaggcatgagccactgcacctggtccctttcatttttaattacctgcatttctgagtagctctagaaccaagaactagagatgatgggatggatgtcctggtcgttggtcagattccgcccactgtttggtgatgggaaccagcttatattcgtgggtcattagcatttcagatgaagtgctggcaagggaccctgccattcagcagcacagtgctgggcacacctgggttgtcacatgtgccctgttaggaggcggtagatgcccctctccctctgtcagagctgagcatggcacttgtaaatagcgtcttcctggaagtgctgggtagggaacacctgtgggggctgttgctcaccccctcttcagggaacgctggtgctcatatttatgtatttggtggcctgaggggaggtactacttcacttgaattggatgtgtgctgctcatgtctttttggagtgtgttctgtgccttttgacagctttcagctttctcctcctcttcaggacctgttaaaggtttcagccctcctctcacaggctagggggcggtcaggatccccgtaccacaaggtgctggggggtatgtgggggctttttcttcatcgtgttcaggtgaatacaagtgtggcctctgtactgggatgctttctttcaccaagcaacctcattacattaaaaaaaaaaaaaaaaaaactctttttttttgtttgttttgtttgagacggagttttgctcttgtctcccaggctggagtacagtggcatgatctcggctcactacaacctccgcctcccggtttcaagcaattcccctgcctcagcctcccgagtagctgggattacaggcgcccgccactatgcccagctaattttttgtatttttagtagagacggggtttcaccatgttggccaggctggtcttgaacttctgaccatgtgatccgcctgcctcagcctcccaaaatgctgatattataggcgtgagccaccgcacccggccgagattcaaacttttaaaaagtggggtgggcgtggtggcttactcctgtaatcccagcaccttgtgagtctgaggcagccggatcatgagatcaggagattgagaccatcctggccaacacggtgaaaccccctctctagtaaaatacaaaaaaaaaaaaaattagccgtttgtggtggtgcgtgcctgtaatcccagctacttgggaggctgaggcaggggaatcacttgaacccaggaggcggatattgcagtgagccgagatcacgccactgcactccagctggatgacagccaggtgggctgtgaattagaaggggtgtcccaggcactgatcaggctcctcgtgctgcagaagtttccttctgagttcatgcattgtccagatgtgcagcagtcaacaaatcagttattgtggcttctctggaagctgacattaccatgtttttggcatgaagtagaaccaacacacaaggttgcagtgccagtgagttgaggacgttctgtggctctatccagctaggtgagaaattgcagggctgaggaagtagtgtgggttgaagtgaagtaggcgggtgggaatgcgtgtgagactcagcagggctctgggctccttcacatgctctacaacttggtgattccggcccttgtgtctgaaaaccatactttgtggttttccatattcttgagacaagtagatcagtagctgtgtggacgctgattgctcttgagaactactgttcttttgttcagaattaaatgcagaagaaagactttttttcttcttacttttagagacagggtcttgcccctttgcccaggctgcagtgcagtggtgcgatcattgcagccttgaacccatggactcaagtgagcctccctccttggcctcccaaagtgctgggattataggcgtgagccactgctcctggccagaaagatgttttctgagacaattgagcaagactcagaagtaggaggaggggatgaaaactgtgcatgcgtatgagtgtgagtatatacgtgtgtgttgttcaggattgctctgtgtttaactagtgtatactttgcaggggaaggaggtgtctgtctgctgtcccactgtttcctttgtctgtcttctgcctttcctacagggtcagatgctcttacttcatgggcgccatgtgttccttgtccccttcccagtcttcttgttgcccttggcttccctggatcccacagcccaggtggggccaaggagtccctgctcaggcactgagagccttgctgtggctgtcagaggttgatggggagactgcccatcttgtgggaagcctttgtaacagtgacttggcaccttcaacaggacggaagaatgtgttagttccgtctcctgtttttgtaaaatggttgtccacctgttgaactgcatcagcctctcaaccaggcagaaggcttagagaatccatgtcagcccccaagtccagggagccccagtgtgagctggacaggacatagattgcccccaggcctgggggggtgaagtgacgtgcagaattgaaggaccaaggcagggagtggcagtaggcaggacaggtcctggtggttctgctgaatccctgggctggggctgggctgaggagctaaagccacaggcaaaatgtaccacacgcagacctttagccacccacagtaactttgttttcggaccttgattcattctgtgggacaggacatgatataggttacctgcctgtccagatcctgccccagagtgggacagtcgtgtatggcagagcattagctgggagaggtcacactagctgggtgtggaccttgtcctcctgtgcgtcccctcaaaaccaggtaatgtgtcctcaggatttccctggcacaaacgacctcgctctccctcagtcctcaaaggtgatggccagtcctggttacccgggaagcccgtgccctgtgactcccttcctgccactgggcatccctgtagcccccattcctccagcaatcagcctcagtggtgtgtttggttcacaccttgtgcttgcactgtgactgaaacctcccctcctcagcgaggcttctcctgggcccccaggctgggcttatgcccctcaggtccttctcagccctgtgcttttccttagggctttggtgtgattctcgggcacctgtgcttagggagtgcttgtttctgtaactgggttaaagtttcatccactgcagcaattgagtttatagcatgtaatttccttctaccagggacctatttatcttgagtgttctaagtgtgggcttttgggacagtataaaattgaccctgtagcaagctgtcttgtctgcacatagcactttttgaaactaaatttccttctgacttgtcaaaagagttaaccttgagtccttgctctggatttaatttacacgttcgagtctgtccgctgtgccccccacatacaaggtcttgctccgttgcccaggctggagtgtagtggcacaatcacagctcactgcagccttgacctcctggattcaagcagtccttccacctcagcttcctgcgtagctgagaccacaggcgtgtaccaccacaactggctattttttaatttttttaaaattttttttttttttgagacggagtcttgctccgtcgcccaggctggagcgcagtggagcaatctcagctcactgcaacctccacctcctgggttcaagcagttctcccgagtagctgggattacaggtgcccgccaccacacctggctaatttttgtatttttagtagagatggggtttcaccatcttggccaggctggtctcgagctcctggcctcgtgatccacccgtcttggcctcccaaagtgttgggattacaggcatgagccaccacacctggccaaattttttgtgtttttttttttttgtttattttttgtttttgttttgcttttgagacagagtttcgttcttgttgcccaggctggagtgcaatggcacaatcttggctcaccgcaacctctacttcctgggttcaagcagttctcctgcctcagcccctggagtagccgggagtataggtatgcgccaacacgcctggctaactttgtatttttagtagagacagggtttctccatgttggtcagctggtcttgaactcccgacctcaggtgatctgcccaccttggcctcccgaagtgctgggattacaggcatgagccaccacaccctgcctatataaatttttatcagaaggccaggtgcagttgcttcactgcctgtaatcccagcactttgggaggccgaggtgggtggatcacctgagctcaggagttcgagaccagcctgggcaacatggtgaaatcccatctgttccaaaaatacaaaaaattagctgggtgtgttggcacccacctgtggtcccagctactcaggaggctgaggtaggaagatcgcttgaacctgggaggcggaggttgcagtgagctgagatggagacattgcccccagcctgggtgacagagtgagaccctgtctcaaaaaaaaaaaaaaatttattggagacgaagtctccctttgttgcccaggctcatcttgaattcctaggctgtagtgatcctccctccttggcctcccaaagagttgggattacaggtgtgagccactgtgcccccccccacccccttagtttctgtttttgaaacctacttttctctgtagtccattctgctataaggcttattttggaaaagcagatttgttccaacacaattgatgtgttagaggaccgtcgaggtgtaacacaaatgttgcgatggttgcgtgtggttttgttcaggagaaacactaggctagggattggaaaactatggcccacaaggtggtggcctgttttggtaaatagagtttaattcgcagacacgcccattcaggtatgtacagttgggcctccatatccttgtgttttgtgtctttgagttctaccaaccgtggattgaaaatatttggggtaagccaggcatggtggtatgtgcttgtaattctagctacttgggaggctgaggcaggaggatctcttgagcccaggagcttgagaccagcctgggcaatacagtgggaccccatctcttaaaaaaatttttttgggggctgggcacggtgactcacacctgtaatcctagcactttgggaagccgaggcaggtggattgcctgagttcaggagttcgagaccagcctgggcaacacagtgaaaccccgtctctactaaaatacaaaaagttagccaggcgtggtggcatgtgcctgtagtcccacttactcgggaggccgaggcaggagaattgcttgaaccccagaggcagaggttgcagtgagctgagattgtgccgcgccactccactccagcctgggtgacagagcaagactctgggtcttaaaaaaaaaattttttttgaaggaaaataatggaaaaaacaatacaacataaaataatacaaataaaactatagtataacagctgtttatgtagcatttacattttatggagtattataagtaatctagaggtgactcactaaagcatatggaaggatgtacgtaggttgtatgctaatactacaccattttatatctgggattgagcatctgggaattttggcatcccgggagttcctggaaataatcctccaagggtctggagggacagctgtcctgtcagaaccacagagctgagcattcctgacagagactaaatggcccgcagagccaaaattatttactgtgtagcattttaagaaaaagtttactggccaggcgtggtggcttacgcctgtaatcccagcactttgggaggctgaggcaggcggatcacgaggtcaggagatcgagaccatcctggctaacacgatgaaacaccatctctactaaaaatacaaaaacaaaattagccgggcatggtggtgggcgcctgtagtcccagctactcgggaggctgaggcaggagaatggagtgaacacgggaggcagagtttgcagtgagccgagatcgcgccactgcactccagcctgagcgacacagcgagactccatctcaaaaaaaaaaaaaaaaagagagaaaaagtttgccaactcttgcattaggtgaatctagaaaactgttaccagtttaatatagtagagcacctgtgagtacatgaaataaaactgcccacacctcagacatgctccaagtcccctcggggtcccgcatgttatgggccacaccctatccctttccggggtcagacagcctccctccagcagaaatggcagcccacccatgctcacggcaagcagtaagttttccccgaggtgagggtcagacttgcaacatttgtatatttcttagccactgagcatgtgtgtagctgtgctgcccatatatccacatgtgtcattgcttgggctcctatcttacgtcatagatgaagttttggagtactgtgtccctaacccttatgtccataagccctgtgtttttatcacatgggtttgcatcccgcagtgtttttaggagtgctgcctctgttgcgctacagcagaacttaaccatactttgaaggcaaaggcaaacaccaaaaggtttgctctcattcgtgacagtaaagtcgtaatcacttaatatctcatctggacctcttggtgtgagagggcaaggtcaagcccaaattgtacaggtccagtgctccccatgtcctttggaatcttcaggtctgactctttgagtggttgatggggccttctgatggctgactgggtacttttgtgccttggtttccccacctgcaaaaaggcggctgatgagagtatttaccttacaggtggttgtggggtagatgctcaatcagtgttgggtgttttgcacttaaaaattagaagatccccatgcttctattaattacaaaggagcaacagatttggatgaaaccctgaggatcccagagctgaaagtgagtttgaagtgtccgatccagtccttcaactcagagcactcctatctgtgacacctctgcccacgcatccagtatgtgcagcacacctgctctgtgactgacactcttgcagaagtggggccacttcagggacatggacaaggtgttgtacctgctgtcacagagcctgttatctggtgagtgattgggacattctgagggctcataccttctggctgcaggttcttcccaggggcctcccagagcttcttccatagccccaggcagggcaagtctagattcagtcttgcctggagacatctgaggatggctgttccatcctcctcctcacatgtatgcagctctcctttgagccccacctgtgcctgtcacttcaggtgaaagcagtgtaaacatgattaacaaggccaggctcggtggctcacgcctgtaatcctagcactttgggaggccgaggcgggcggatcacgaggtcaggagatcgagaccatcctggctaacacggtgaaaccctgtctctactaaaaaatacaaaaaattagccgggcgtggtgatgggcgcctgtagtcccagctgctggggaggctgaggcaggagaatggtgtgaacccgggaggcggagcttgcagtgagccgagatcatgccactgcactccagcctgggcaacagactgagactgtgtctcaaaaaaaaaaaaaaagattaacaaaaggccccttgcacactgtggaaggcttatcagagtggccacctagacagaggcatggtagcctgagttcagacctagcctggactttcacccagccagacttcagttgtgcctgtaccttgtgggatgacacatgcccgtctccaactcatgcaggctctcagtgagaggtagttggctccagccagcttgcacctccccactgctggtcttatcctaggaccactgcagggagacgatctctcagtttggggtctttgaaggctcagggagctcctagccagctgactaggctggggtccatcctgataacatgagagagagaagatgtctgtatctctggtgtgtctttacttttcaggccaccaagggttaagaacccagcgtcagccagtgagtagtagacatctgttctccttttgagaaagcctgtagttcaggactcaccacggctttcccttccttggcctgaaaccctccctgctcagctgcttggcgcatgctgttcccctgcctggaacgtctcgcctaattccttttcctgccctggcctcagtctgggagacgccatctcagtccccatgtcttggagttttaaatgaaagcactttacttgtttgctcctctttgccctgtagggcaaccctgggaatcacatgcttcatgagtctaatttacagaaacgtaggcgtaactcagcagtgcataccaagcccatactgtttgctctacactgaaaatgaagatgaatggtgaaaaaaagtttctgccattgagagcttaacattgagttgcagtgagagatgaagctcctgagtggcacggagattgttgccagggctctggtgaggtacgctgtggcctggtggttgtggccactcagggaggcttgtggcctatatagaaggcgggctgtgggaatgagctggggggtttgggttgactgtttagaatttgagagtctctagcatatggcacagaaggtagatgatttaagctgcgtggacatcttcgataaacactggaagaatgggcagtggtatcctctctcggcccactgaagcttctgtgtccatcttgtgtccttagtcctatgcgttggagtattggaggagccagcttccccctctctccagagcttctcaccctagggagcctccttcctcctcgcctggatgaggtactgtctttctttgttagtttctttctttccttttttctttaagaaacatggcctcactatgttgcccagcctggactcatacacctgggctcaagtgatgctcctgccttggtctcctgagtagctgggactacaggcatgtgccactgtgcctggcttcacacttgtgcttttgattctcatccttagcaggtggggctgttgttttatctggttttcttttttaatccttgctttctttgaatacaggactgattcatagtcactgttaaagaattcaagcaatacagaaatgtttactatagtaagtgaaagtttcttaataatctactcttcagagattactaccactgattttggtccagttcctttcagttttgattttagtgaagttactttcagttttttccctatatacaccttttttttttttttaaaccatgtaaatggtactatgctattctgcaacttttctcccacagttctttccatttttcttcacatagcattgtctgtgaagtagggatgggaaaactgaggctcagctcaagcatcacttgagcccaggtgttttgagtccagcctgggcaacatagtgagaccttgttcttaaagaaaaaagtttgggttgactgtttagaatttgagagtctctatctagcatgtggcacagagggtagataatttaagctgcatggacatctttgataaacactgtggaagaaggggcagtggcatcctctcttggcccactgaagcttctgtgtccatcttgtgtccttggtcctgtggttgattgacagacctctcccctggcccatggccagccagcgtgtgtgtgatggagctgagaccaagtctctgttccctgctgtgtctagttgtaggagctgactgcttggaacacctttctgtctctcaagttaagttgtatctctcgtacttggccttaatgaagtttgacattgagaagtccagagctgctgtttccggtgtggcttccttccggaatgagtcctagtcactgttactcagagatgtgcgtcaggaagtggctcgggccacagttctgagcagatggaggtgtctgttctgcatgggaaagaagtatgcttgtcaggcaggctctgccaatgccaaaacttggcccacctattctctccttaccccctcaacaggtccttctgggccacaacaaggtaccctggtttgactcttaggaagtgggagagccactgaagggggtacagatccaggatgtggctttgggagcttcctcgggctatgctgccgggaggagagtagacaggggttctgggtccagaggcccatctgtgctgtgcatcaatctgtgtgaagggcagggccacaggggcgctctggaggtgggcacctgggcgcaggcttgctgcagctgtgtgcctacagggtccttgtgtcttgagtgttgggcgcagctcacagctagcgaggctagcacctggaccccgttgtcatcatctgactcagcactggttgcttcatgggcccttcttccttcctgataggaagaggtgccctgaggtgccctgtgcctcctgaggacagtggctgcccccaggttcagggctctgctcctcagcatctccgtggggctcatcgtgggcctcgcactcagcacatccgaactgtagcccaaccttccttcctcaaatctgctcctccccatctcagaaaagccagccccactggtccagttgctcaggcaaaaacaagtgaaagaaagcaaccccctccggagtgccccaactcccctctgctctgtccccttccccagtgtagctgcaccataggaaccgctcccctgccctgcagtcctccagccaggtgatcctttagagcaagccagattcctcccctccggcctgggccagtgcttcccccagcacatgtctccgctcaggccctgtctccttcagggctggcttccggtgccgcccgttccacccagcccccgtccctctgtgtgctctgactgccccgtgctctgcctcgtgtccccacagcaccgtcaccaacaccctctgtcatttcgctcgttttccagcatgggggtggatggtgttccctctgtcttgttcaccactgagtccccagcccacagtggaggctcggtgagctgctgtcgggtgaggaggcagaaagacgcctaaaatccaccgttaagagcatcagccctgctgctcccgccagtgctttaacccacttactgcgaagcctcactttcttcctgtctgaaataagggtgttactatgggtatgttagtgatgggtgccacagatggcattttatggtagagttagtattagcattgtgatctcaggggtttggttttatgatttgtgtcatgtacttaatttctcttttaattatcaagagatgcgtactggcctggtgtgccagaagtgtgctgggtgccttctgtttgtcccccaagtcctctttaagagttctggttcctgccacagcatcagtcagccttttggaattgttctagaacatgttttctgcctgaggctctcaggccagttggatggtggcattttacgaaaataaagcagcattcctatctgccctaaagcccatggaggtgctcccggtcagagctgcgctgtacctgtgtggggtctctagtgtggctggaacctgtcctttttggcccctagttgaggaagagctgggctacgcccccaccacctgccagcccagtgtgtgcgggacgtatcagaggagaccgatgcccactcagccttgctggtgctgctcatctgtgctggcttgcagtccggcctggggtgtttggagagagtgaggaggagggtgaggctgaccttcaaccttgtgtctcaggcagccctggcagcctcagtgctctcctctttcaaatgggcacactgctgttgggatctgtctgtgcaggcagcagccggcagaggatctcagcccccaggacggggctactctccatgcactggcagctcccgcacaacccttgcctggaacttccgccaccggagctgccttcccctcactctcccctgtcactgggaattttgaaatgaatcctcatttgccagtcagggtgacctagcctcttcacctacttttaggaagtgttctaatgtaccccccactgctctttgcaggagtcatctgtcgcgctttcttcttcctgacaactttgctcctgggtctgtgcttgctgtgcggtggccgccagccctgttgtgctgggggcactagtcccgcttgcttcgaggagggaggagccactccttactggcacctgccctccccaggagcaagtgtcctgtggtggccgaggattggccagtagcaggccctgcgtcattggtcttggcagtggaggaggctcctgccaaaggagccccctgcactcgggggctggccccaccccctccagctgtgcctgtccttcctgaggtgggggaggggtgccgcagggccccgccccgcagtggcctgcctctgggaggcacaggcatagggcaggcgggcgctgtgaggccagccgtcagtgccgggcctgggattggcagagttccaggccttaggcttcatagtgagctgctgtgcaccttgagtacacgccagccagccctctgctgaggaccctgacctgctaccacaacagggggcccaacaagagaggtctctggggctggagggagcagctctgctgggcacctgaggccctgctccatcctgcatctctcagaacctctgggtagcctctggtcctataccagtgagaacgaagtgaggccacacaggcacggcccccctgatctggctgtcagttccaccttgtccatgtgggctggagcagcttcgagaactcattcagggtcttgggttcaaatgggcttcatggaactgagcccagagcttacagggtgggaggctgtgctgggaggggccctgcctggctggaacaggggcagagtggggagcatgggggtttctttgagtcacagggaagggtgctatgtcctggaggtggaggtgcattctccctgtccacctggggacctcatccccaacagtagttataaggccagactgggaagcttcatccgtagagtggggcccttacttgtccgaggtcctggcctcccctcatctctcacctaaacaggcttttccctgccctgggcctgggagtgcacatacctgctgtctaaggcagtgcttgaaggagaaatgtcccacccctcccacagtgagggaaatgagaggaggggacccacactctgagggcagtgacttatctgtggtctcatgggaggcaagacagacaacctgttagtgagcagttcagatggggtttatgggcaaggcatgtcggaggaaggaaggacagagaccatagaacttcagggctgagagggacaccgtagcattcctcacctcccccagagaagtgaggccatgacctccacattcgacctctacctgggctccattccacggaggagctgaggggcagctgagcaggagcgggggcgggggtggacagggtggccgggggcagcggaggccgcacagttggtgtgggataggtggtaggtgcaggctgggatgccagaggggctggggacaggtggaggcaagtctgaaaacctgtgcccttgagattcggagtctccctgcctcagcctggtcatgttaagggtcagccatggcacctgggtggtggtgagacagggtagggagcacagagctgctctgggcctgtgtgaagcaccagggatttcctggccttgaggagaccccagtgtttcaagccggtgcccgggtgccctggctggaccacactggcacaacacgcatgtagacggcctgctttccctctggctccaggagcgtgaagcagctgtctctttctttcctttcagtttgagtgcatgagggggcacatttgggcagggccttgcgctattgctcatttgtgaaattggctcctttaaggaagctgcagatgagtcagctctggagtgcgtcccatggatggcgacaggacccctgtgttgccttgtgctgcccccagcttccagacggtctgcctggctctacctgggacaggcttccccagggtgtttgccagtgaggaaactaaggctctggcaagatgagtgccctgcctgtgaggacacagataggaccagagggcttcagcatagagcatgccacaggtgtgaattggggttctctgtggggcccaagtgggcaccaactgtcccatggaaaactgtgacacttcgggaattccactagagctcagctgctaaatttctcttttgtcctctggtaaacactgggatgcttttttaagaacctgactctctctgtctcaattcctgtgccctgtcctgttgggacgtcgaggccgggattagagcagcccctttaagagtgccagtgtcccagaccctgctgtggaatgccagccgcctccctgcagacagacatcgctgtgctgtcgtcctgtctccgtgagggttaacaacacttcagcctgttgtctggaaccggttcagactggttttctggaaagtgctttgtctctccgactgaatcctgggaagggtcatgtggagccagtgatgtcatgggatcaaaaactgactcagctgtttttttcttctttttctttcttctttaaatcaagatatgtgtgtgctgcaggtacagggcagtggcacgttgatgggccaggcctcactctactcaaagtgtacctcactggcaaccaaagggttaaatgtgatccccagtccccactccccagaggtgagcagggagtgaggagacctcccttccctgaaggggagaagctggggttaactcgagtcaccacagcatagggctagtcccaggccccgaccctgctcctggaacagtgcagtcaccgccctcctggattccagacattgcaggtgctgaaaatcccaaaggcaggtagttgagatctagaacaacttttcctctgtttgctgttgagcctttccttgctgataagcagccaccttccactgctcctgttcagcaccctgctgcctctggcccccaacagggcagggtgtagtttggctccaccaatgttcagccacacagtggaggctggggacacccccctcctgcctagccttcctcaaggcagtgatgaaatgtcctggggatgcttttctgggccctgcgtttgttgtacattcttttgccatccttcccatagggaggaaaacactgaaagcaacactgaaaagtctccaagaaggtggcaccttcattgcacccagttaaaatgttgtgtcttctcctccctcccaagttcagaatgaccgaagaagcatgccgaacacggagtcagaaacgagcgcttgaacgggacccaacagaggacgatgtggagagcaagaaaataaaaatggagagaggattgttggcttcagatttaaacactgacggagacatgagggtgacacctgagccgggagcaggtccaacccaaggattgctgagggcaacagaggccacggccatggccatgggcagaggcgaagggctggtgggcgatgggcccgtggacatgcgcacctcacacaggtgagtgggaggagccagcgggaggggctggaacctggagacaagcccagtgtgcccaggttggggctggccacactccaggcctgttggtaacagcttggcggggttgtggagagggctgtaggctcagctcgggcatcacccaccactggcagctgtgctgttgtggccattccagggccccaggtcccaactgcaagtggcacagagtgtgggtctcacaggagaaggagtggcacattccatcagctcccctgccatcagtaggcctttgccacccacgcacctgctgtctgtccaactcggtgcttttggtttgtagggacacttgagttattcatttggttatgcttccctgcttttcagatctagaggtcagagggccaggaatgctacacctaccttggtcacttggctagggatagagttgggagcccagcccagggcaccctcctcggagcgggtacgggatgctcactcgactccatgttcacttggtgctggtctttggcttgctctgttggtttgtccttagtcaacactgattacttcaagagtgactttcctcatattcaccttttatgagtctcttaaggtaaaagcttgaaataaaaataagacccaatctaccacctatttcttgacttcaaaaccttcctttctctctgtaaagacaaattcagacccagcacctgctcttgcatcacccctccccttggagctctccagaatgttcatgcccagacacccactgagggctgtggtgtggccacagcttcccggctggccctctgacaaactcctctgtggcccgttgctctctctcctcaccgcccactggagtcttctccctgtggagggcctgtctctccacgcctgttcataagggacagctggtggctcctcaccttcccgtgtcagctaaccccacaggatgaccccagcctgcagtcttatgtcaaattcgtttttggaacccaaactgttgggatcctgaggacttcagagatcatctggtgttcacagcgtttaaaatgggaagataaatgggaaaacccaagcctgctcctgttgacaaagcctcctagtctgaggaaatatactttgtagtcctgctgtccaaagagggcttttctgtctgactctgctgtctgcagtccccattctaaaaccaaggtcctcttctaaagttccagaaataaaactataggtccaagtctccttttcctttctctatgttttcagccagagaccagtccatgacagctcagcaggggtgagcagtgaggggctggtgtggagtcagggcaggaagaggaggagtccatgttcatgggaatctgcagtccatgtgcatggggtcccttgtgcattcctgggttgctgacatgcattttctcctgtaatcaccatgttcccctgcagggtaggtcagtggattgtgagggagaagttaagtgttaaagaaactcagagttcagctgggcgcggtgactcacgcctgtaatcccagcactttagggggccgaggcgggtggatcacaaggtcaggagattgagaccatcctggctaacacggtgaaaccccatctctactaaaaatacaaaaaaattagctgggtgtggtggcgggtgcctgtagtcccagcgacttgggaggctgaggcaggagaatggtgtgaacctgggaggcggagcttgcaatgagccgagatcgcgccactgtacttcagcctggggaaagagtgagactctgtctcaaaaaacaaaaaaatattgctagcacctctgaagccccctcatgcttgcttgctgccactgtcttccaagggtaatcactttcttgacaatatggattagtttttcctgctttggtactttaaataagtgggattatatactatgtaccttttatcttcctgctttcactcagcattgtgagatttacccatattgttgtgcataccagtagttaatccattttcattgctgtatagtattttgtttatagagtttctatttgggtgtttttcaaaactacctttttttctttcatgctaacttattaccatcttatgaccgaatctgggcatattgaaagctagaggcagtttctgatggcttctaggagagagaatttcctttttctttagtggctggtgaattggaatcatcaagaaatatatatgtttgcatgtgtgtgtatagtgtacatattgctatgttggatgatttggagcatgcagaggcagatacagtagtagaatcagctttctgcctccatcttttactccgctccctgtcgctctttaactcagcagtttttctctctcagtctcccaacttgtgtgagtgttttatattctacataaattgagggtggagggcaacttctggttgtgttgaatgaggagattggcagaattgacaaaagcaaaatgaaacaatctcagcattctggaaaaattgagcaggggcatacaacaatctgagaagtatttatgcctgtaactgctgaatttcaggtgagaacagtgagactgtatggcatttggcctggagctattcctatgccctctcccatctgtttggtaaagaggttctgtccagccactgtcagctgtgaggaccaacagcttcgctgtgtgggtgaaaaggaggactgttcattttagagtggtagcaaccctgcctgtggtcttgtagatgagagtgacagtcttggagatgggcaagtggggagacacagcggctctgttttagcccaaggttggggcaagatagaaaaactatttgaagaaataatgggcaaaaacataacttgaggagaaactcatccaggaatcccaacaaaccctaaatagcataagtacaaagagatcttgacctagatacatcatagtcaaactgtagaaagccaaagaaaagaagaaaatcttgaaagtagcaaaagaaaaacaactcagcacatctggggagcattaataagatgaacagctgacttctgactcgagacaatggaaacaaaaaggagttgaatgatgttaaaagtatccaaagaagaaaactgccaacccagaattctataccagtaaaaacagtccttcaaaaatgaaagcaaaaaagacattgtcaggtaaacaagactgaaggaatccattgctggtagacctgccagttcttcagcctgaaaataaatgacacgttggcagcttgagtctatgagaagaaataaagaacactggaaatggtaaatgcatgggttaactggaaagacttaactagttctgcagtctggaagccaaccaaaggctttgaatgatttgttgggtttataatatccacagataaaatatatgtcatattagtacaaaagatggggaattaaatggagcaatattggagcaaaatttctgtatcttactggaatcaagttagcatcagtcttatatagattgtgattaagatgcttactgtaatgcctagagcagctctgaacaaaataactttaaaatatagttttttaaaaaaatcagggctgggcacagtggctgactcctgtaattccagcactttgggaggctgaggcaggtggatcacaaggtcaggagaccaagaccatcctggctaacgcagtgaaaccccgtctctactaaaaatacaaaaaaattagcctggcatggtggtgggcacctgtagtcccagctacttgggaggctgaggcaggaaaatggtgtgaacctgggaggcggagcttgcagtgagccaagatcgcgccactgcactccaacctggatgaaagaacgagactccatctcaaaaaaaaagaaaaaaagatcatcagaattaaagttatacactaaaaaatatttaacacgaaagaaggcagtttctttattcactgagaaataaaggaacaaacaagaggacatgtagaaaacaaaatggcaaatgtcaatccagccatgtcaataatgcagtaactgtgaaggatctaaatacctcaatcaaaaggcaaggactatcagatagtgtaaagaagcaagattcaggctgggcgcagtggctcacgcctgtaatgccagcactttgggaggccaaagtgggcggatcacaaggtcaggagtttgatagcagcccctggccaatatggtgaaaccccgtctctactaaaaatacaaaaattagccaggcgtggtggcacgcacctatagtcccagctacttgggaggctgaggcaggagaatcacttgaatccgtgaagcggaggttgcagtaagctgagatggtgccactgcactccagcctgggtgacagagctccgtctgtctcagaaaaaaaaaaaaagaagcaagattcagcttaattatatgttgtttataagtgacgccccttagattcaaggaataatacaaaaggatggaaaaagaggtaccataagtaaccgcttgagagctggagtaactgtattaataagagataaaagacactttaagaccaaaaaattactagagccaaactgcgactttatttttttttttgtttttttttttttgagacagagtctcactctgtcacccaggctggagtgcagtggcacgatctccacctcgtgggtttcagtgattctcctgcctcagcctcttgagtagctgagactacaggtgcccgccaccacgcccagctaattttttgtatttttagtagaggcagggtttcaccatgttggccaggctgatcttgaactcctgacctcgtgatccgcccgcctcaccctcccaaattgctgggattacaggcgtgagccactgtgcccagctgcgacatttcatatgatatttcaggaagacataacagtcagcagagcccccaaatacctgaaaacataaacttgataggattgatggaaattaatcagttatagttagagatttcaatatcccactctcaataattggtagaacatctagacaaaattggcaaggtatggaggacttgaagaacattattaactcacttagcctgacatctgtagaatacctggtgaatgcagaatacatcctcccaattgtaggtgaacgttctctgttgatcatacattggaccataaaacaaggctccagtatagctgtaaaaaacaaaaaaaaaaggaagtaacaagtgttgaggaggaagtgtagaaactggaattcctcatacattgctggtaggaatgtaaaatagcccagatagtttcttacagagttagttgtaaacttaccgtatgacttagcaatttatccaagagaaatgaaaatgtgtccacacagacaggtacacctgcagcagcatgattcatactggtcgaaaagtagaagcagggccaggcacagtggctcacgcctgtaatcccagcacattgggaggccgaggcaggcggatcacctgaggtcaagagtttgagaccagcctggccaacatggtgaaaccccgtctccactaaaaatacagaaatttgcctggtgtggtggcgtgcacctgtagtcccagctacgtgggaggctgaggagggagaattgtttgaacctgggaggcagaggttacagtgagccgagatcgtgccgctgtactccagcctggtgacagaacaagactgtctcaaaaaaaaaaaaaaaaaaagtggaagcaacccagtgtcccatggataaaacaaacctgctacctctatataccagattactgttcagctttataaactactcatgtgtgccataacatggctgaatctcagacttgccacgctaaggaggatacagcagatgcagggactacttgttgtatagtttcacttacagggcatgtccccccaaaaagcaaatttatttgagagatggaaagtgaccagtggttgactaggacagggctgggggtgggtgggagcagtgattaacaacacatgggcacgttttgggaagatggaaatattttaaaattgtatcgtggtgatgattgcacaaatttactgaaatcattgaatggtactcttacggtggctgaattttgcggtatgtaaagtatacctcaatatggatgttaaaaataaataattaaatgaaggttaaaatagtttggtttctgttgtggcatccataaatgtgcacacagaaaaacaaaacccgcagaggtagaagttgtgagtctgttggttttgtgaggccaatccaaaggtcgtgggcatgtgctgcccctatgccgagtctggactgtcagatgaggctggagctggcaggcagaggaggctgcttttggttctctgttttttggagttggtcttgcactgtcggccaggcaagagtgcagtggtgcagtcgtagctcactgcagccttgaacacctcggctcaagccactcaagtaggtgggaccatagatgcatgctactacacctggatggggtttttctgttgttctttttaaaaaattttttgtagagatggggtttattatgttccccagactggtcctgaactcctgatctcaagtgatcctcctgcctcagcctcccaaagtgctgggattatagatgagccacggcaccaggccggttctttctgttttgtttttgtgataagtagcagatccagtcctgcactttcctgtaggggagagtctctttctttcaaatggttgatcttcagaaataactggccacacccagatggaaatagcttgatttgttttcttttcttttttttttttgagatggagtttcgttcttgttgcccagactggagtgtggtggcgtggtctcagctcactgcaacctctgcctctcaggttcaagtgtttctcctgcctcagcctcctgagtagctgggattacaggtacttgccaccacgcccagctaatttttgtatttttagtagagacagggtttcaccatgtaggccaggctggtcttgaactcctgacctcaggtaatccacccacctcaacctccgaaagtgctgggattacaagtgtgagccactgtacccagccttgatttgtttttttttttggatggaagagcacgttgctcggtaaaaatgcggctcttctccaggggtcctgcaactgaaaggtaaggactgagggtccctcagtcaccttgggcctgcatggggtgagggaatgagaactctgtgaatggccacacctcactgaggatgtgtttgtatgtgccttttctgaagtgtcaactcttattggattgtcagtggtccaggaccagacctgctgtatgccaggtactatgctgatctctggtagagaggtaatcaagacaggatctgatttatgcagctatttttttggaagaccatgtcatgaaggaaagcgcagaggtcttggaaagaaggacttgccattgccgatgtggctcaccgtctccatttccttacttcacctgggaggagactgggctgtggcttccgtggtccatggattgggcagacttcaacacagcctaggtggatatctggcaagttgtccccgttagtggtgtgtggcgttcaggcagctcttgtgtcttgctcttctcttccccacctccccttgtaccatgagtggcttgtctgctgtgggagggggcagcacttggaccaaaggcctgccccatggtctggacggggcaggctgggatgtgtgttccttggccactttggggctcaaagtagcatctgtgctgttagatctgatcttggctttagttttttttggccttcagctccctggtcaagcacttgtggccagtgacagactgtaaaacacactggaaatgtagtctgtttactgggcctgcaaaaccagtcgcaattggtgacactggtgtccttgatgacaattagaatcattgccgttgtctttctttttagacttttgcagtcaccaagagggcggtggggtgacacatctgtgtcacttccctgcccagagaatgcactggctgatcatttgatattaagacaggttaggccacccaccacggtgagcatgcgtgcccatcattaaaatgcaggttaggccaggcgcggtggctcacgcctgtaatcccagcactttgggaggccgaggcgggcagatcacgaggtcaggagatcgagaccatcctggctaacatggtgaaaccccgtctctacttaaaaaaaaaaaaaaaaaaaaaattagccgggcgtagtggtgggcacctgtagtcccagcaacttgggtggctgaggcaggagaatggcgtgaactcgggaggtcaggcttgcagtgagcccagatcacaccactgcactccagcctgggcgacagagcgagactccgtctcaaaaaaacaaaaacaacacatattaacacccaagccttccaaaaccaaaaacaaatcagaaagtaatgtgatattgcttcttcctagacatccagccacccagttgtccagaacgtgggagtgtggacggctttgttttgttctgtgccaaaatggggccagctggaaaaaaggtgtgcatcacataatttttgcaagatgtctctgaggatcacggatagagtgagtccttcctgtttggacagatgctttttacagggaagggagaggagggtgaggtcgacactggaattgcccccaaccccgacaaccacgtgagcatggggctctcctggtgtgcccgagacagtgagttctgactcacgtgtgcacctgtgagtcaaaccctgaatttaggtcacaaactttatcacggcccagaaaccttaccatcccactccagaagggccctcacgcactcccagcccttcctgttttggtgcttcccctcatgagactggtcttgcctcttttccggttttccagggatgcactcacagagtcagtgctctttggggtccggcttccttctgagtgttttgggatttgcccctggtgtgtattggtgtgcctctgagtggtgtgcacagggcacttctcacttgtcagtagacatgtgtgcagcctccaatttgggcctggtgtgagcacccgctgctgtgcaaggtccctgcagattgtctgtttgtgggtacgagtcagcatttctcttggtaaacactcaggttaaactgcagggttacaaattgtgtgtgtggttagtcgttttagagaaacgactgggcttttcccccaaaatggtctgtgcttttcacactcacaggtgtggcagtccagcataccgtcttcacttgttgttctcagtctttatagttttagccactgggtccccagagaggttgaggtccagacttggcctacacgtgtggctctgtcttaagcccgtcacccttgtccctctttgatggaagcacgaggccaggcagaagagcccactgccccttgtgctagtcagtcacatagcggatgctcggacagttgctggtgccacagaacccctatcatcgttgtgttggctgcctgcatacgggtggaggggttgtcttcacagcgatgtgcagagctgagcttccaccccctgctctcaggactatgcctccccgcagctgctcccggcccgccggccggctgtctacaggaatgcacgtccttgaatgagatggacgatggactaatgtggcacagctgtcgacgtgagggctcaggaaagggctgggttctcatagcccagggacatggtttgtggccctcacactggctgcctcctacagccctcttggcagggattgaacccctaaatcccccatcggggtgccagagctttggaagtcccacagcaagaagccattttccctttgtgtgaccactggcctgtcccagagtcagggtccagacagggggctccggagcggggtactctgtgggcggctctctggagcccccccctcctccactgccccagcccctccccagcacctgttgagggctggctgctgcctttcacttgctaattctctgtctgcttctgggcaacttccaggagaggctgggtggccccagggagtgccttcaccagctccgactagaaatccacagcctgcgggcatttcttagctcatgggaactgagaggtatgttcccttgggaatctgttttgtgctcccttccctgccttagccgctgcccctccaaacctcagtggccaccgtctgtctcctccttgttctctatgtcacccctttcctgcaggctcctcatccaatttccctttatctgggactctaatcccagaaatcgctgaaatgtgaggggtccacctgtacttctaagaatcgttagattatataggggcaccaggataacagactgccctgtttctaactccccaagtcctcagctcacatgagggccgtagcatgagccggcccggtgccaggtaaaagagcatcactgctggtcttcctgaacttcagcttctccaaggtgttgccagctccctgttgcctttagacgccctcctctggtcatggaggggactcggatccctaactttgaaatggggcttctctcttggacagtgcaggctctctggggatgttattatcctgtggtggctctgacagaaaaccagaggccacactttatatggacatcgaggtaatcaccagtaaatgtttggccttctctgtctgaactcttctcacacatctgtaagttgagcagatttgcagattaagcagacctcttccttctttttaaatgacttgctttctgttttgctgctgcggcttctgatatctcctcccagcatgtattcctgctgttgtcttatttgtcactcactgacaggcttctcttcctgtaactgatgtcccagctcctgtagcgggttatttaaatgtcccatccacagggacaagacggggagggtgtctgaccagcactccgctgtgcccactgaaactgggtttagctatgttgcttttcagtctgcagccagcttccctgccatgctgcaagcagttgcagtgaaaccaacctggaggctacggggcggcttctgagtgctccttaggccgagagccagtcctgtccctcatggtcccctaacctggtgaaggagtggagcgaagggcagtgggcgccaggccttgggggtctctgtgtgcagaacaggtagaaacagacggagtggatacctgggaacctgcaggggcatgtgtgatcccaggtgggacaggcaggcgtcacacccaggggggcagtgttttcccggttagcagaatatgcccctggaagaaaagaaaagcctacctggttagaagagatctttctgaggtttttcttctctctcttaagatgagcatatgaattataatttgtgagcctgagggggcagctggtggtagaaaaaagaacgtgggtgtctgacagcctggatcggccatgtactgaatctctgtgtggcctgggatagtctgcccccactttgtgaatgcctcttgtctcctctgtgaattgaggctccaccatagtgtaaagtcacagtgctgagaggaaggcagggtaacgcctgaagccaagctggatctgctgcctttggaaacactgagttacctgtggctgaggctcgggcagatgccaccgttctctctggagggtgggagacaagggaggggacgtctgatgggtggaaagatgggagacataccagatgttgctatgtgcctcccttgcttgggacctgtgccataggactgcggatttttagagcttatatctttaaaatagttgtgacgtcatcaaattgaaaagctttgggggttcatgcgactgagacttgatgccatgcagaattcctcaaggcagggccctgatagctttcgtacaaagagcattctaaagagagccatcagtccaggcctccaggagacttggcgtgtctgcaggcggtgtgggaagagtggtctgagggcactctctgggggactgcagcccagaaatcatggtgcaccgggtgcaggggtcagagtctgaaggtacacggtggtaggagcagagaccggaaaggtggtctgggatagattgttggatgcaggaagggtggaacatagagttgggactgggccttgggtttgggacccccctctggagaagggagagttgatgctctgagcctaggtggagcccaggatctctcaggcatttggacgggagagaggtggccaacttgctggagaaggaaggagattcctagtcccggagaccagcagtctaggggcagtggggcacaagattcagaatagcgtcctcacactgaggtcctgggtgacctggccagccatgttcctgtgtttgatccacagccatagggcgtcgcccgctttctgtgacttaggtaaacatagaggctgtacagttgccacataaggctgtaagaaccttaaggtgaccaaattttgttggctgatgattaaataggttttataagcaattatagtgtatctttggggtgaatcctattaaatttttagtacctctcacttttcaaaatacaactttggcagcaaaaagaaagttacatgggccatgatacatcagcaggacaggacccaggatcccagcctctgtactactgtcgaggctgccagagatgggaaatccttttcctgaagcactggcacctccccttttccatctgtgggccccagacagcagttggatttgtgggatatgtctgttgacatttactgtgttagaaaatttgaaaatactggccaggcgcagtggcttacgcctgtaatcccagcactttgggaggccgaggtgggcagatcacatgaggccaggagttcgagaccagcctgagcaacatggcaaatccccgttgctacaaaaaaagtagctgggtgtggtggcgcacttctgtaagcccagctacttgggaatctgaggcacaagcaccacttgaacccaggagacagaggttgcagtgagccgagatcgcaccactgcactccagcctcggcgacagagtgagactctgtctcaaaaaaaaaagaaaaaaaatttcagcctgggcaacatagcaaaagtgtctctactaaaaatccaaaaaaattgcagagtggtggcgcacacttgtagtcccagctattcgggaagctaaggtaggagaatcacctgggcctgggaggcagaggctgcagtcagttgagatggcaccactgtactccaggctggacaacctgagttgagaccttgtctcaaaaaaaaaaaacaaaaaaaaacctattattaattcatttaaagatgactatagtagacctgtgacatattagcataaataacttattattaaaaatctattttgcaaatctctttaatactcagcttactaagaaggcagctgctaggttcccgtggctatttctgtgtccatcctcttgcgttctttgtgagggtttgaagcatggtgaagaaaatgtaactagcatggagaagaggttggagagtggaggagcgtttccataggctttttggatcattgtgcgtttcctcctctaatgagaaaccaaaatccagagtggctagtctctactggtgagttggcccttagactctgaaacctcatcattgagctttttgtacatgggttacattaaaatccgtgggactcttttacactttgaacagaaaaatctgtttttaaaactaacttttaattttagaatagtcttagactcacagaaaagttgcaaagatcagtcctgcaaacctcatcccagtctccacattgttaacagactacagaacatgtgtcacaagtagtgagccagggtccatgtattattttaaccgagttcatactttattctgatttcctcagttttttccagctgtcctttttcccttacgttatatttaatccttgcgtctccctagattccttggactatgacagtttctcgtactttctttgttttgggttaccttgtcagttttgaggagcagaggtcaagtgttctgtagaatgtcagtgcattgggatttgtcagatgcttttctcacaggcaggtgatggatttgggggaggaagaccacagagggtgaagtgctcttctcgtcacatcatatcaaaggtactgctggtcttgaatgaacgatcgttttggtgaggtgccatttgtcaggtttttctactgtaaagttacccttccctccttcccctgctccaccatttccatactgtcctctttggaaggaagttactatgtgtggcccactcttttttttttttttttttttttttgagatggagtctcactgcgttacctaggctggagtgcaatggcatgatctcggctcactgcaacctctgcctcccaggttctagtgattctcctgccttagccttgtgagtagctgggattacaggcactttagagaaggggttgttcaccaagttggctaggctggtctcaaacttctggcctcctgtgatccacccgcctcggctcccaaagtgctaggattccaggtgtgagccaccgtgcctggcgacacagcctactcttgaggaatggggactcatgctcacctcttcaaaggtgaattgtctgcataaattatttgggattcttctgcctgacagttttatcttttcttcccctgaatgacattttactcacgtatgagtttgtaataccattgaatgttggaaaatagtagtttactgggttatagagacgtttcagatacacatatcatcatttagtgtcacaaaatcagatttgtcaatgtcaccacctatccgttgggaagttgttgagctcacagcaagtagcaaatataagttttccaaaattctgatttttgattaatggaagctcgtactttatcactggtaccagatacccttgggtgtttttcatgaagcaccaggctttgcatgaatgctcacgcgagcgtttctcttcatggcgccattccactgcagtatgcagcaggagggcttcttcctgtcgtactttgtcatgggataccacagagacactactcagaggttgacgtttaatcgcatttcatgactgccccccgaggtgagtggcgtccccttctgcagatgaagaaacttggcctcattgaggtttggtgaatgggccagtcgccccaacacctgcagaggtgcacccagccccctcagtggtcctcgtgggtcacttgtggccattctgcactgagcaactggagcaggtctgattgggttgtgggtgtacctagctggctagggggacaggtgcaagtgatggggatccagccacttgtgatgcagatgtttaaaagaggggcaggaggtttccaggcacagcgagcactttccattcattgagaaagtttgtggtcgtttcagaagcagtgtgtgtttcatgtttgtggctttcatgcacacaggtgacttctctctccctgtgtattggcgaggaagctggcatctctcccaggagatgccttcagttcatttgctgtagggagtccttcctccaccctgcttgaggagttctcaccatgttttctccctggaggaaagtgggcctagcatgggtgtagggaccagcatcaggaggggtgctgcgatcagtggccagggtttctcctcctctttgtcctttactctccccacaccaggccctcaggagcctggattcctgagctccacaaccatcctaccccttccagcaggctttggcccacttgcagtgtgagtgtccaccacctctgaggtttgtttctttccttttttaaaagacagggtcttgctctgtctcccaaactggaatgcagtggtacagtcatagctcactgtagcctccagctcctgggctcaagtgatccttctgcctcagtctcttgagtagctgggactacaggtgcttgccaccatgcccagctttttaatttttttagagacagggtctcactgtgttgcccaggctggtcttgaactccaaagctcaggtcatcctctcacctcagcctcccaaagcgctgggattgcaggcatgaaccatcgcacctggccatattttgtttctgaccatcccctgacttgtcttgtgatttgggtaagttatcatttcttgatagagtccgagggccacatctgtgtcctcacactgcctcctccttcacacctcagggacttagcttgtggatgctactggctgtccaggatccttcagccataaataaaggttcactattccaaaaatgacatagtggggctcagtggctcacgcctgttacagcactttgggaggctgaggtggaaggatcacctgatcccaagaagttcaagaccaagcctgggcaatacatagtagttcccatatctaccaataaataacaaattaattcgctgggtgtggtggctcgtgcctgtagtcccagctactcaggaggctgaggtgggaggatcgcttgagcccaggaagtcgaggctgtagtgagctgtgattgtaccattgcactccagcctggtttacagaatgagaccctgtctcaaaaaaaataaaatatgaccgagcgcggtggctcatgcctgtatctcagcactttgggaggccgaggtgggcagatcacttgagcccaggagtttgagaccagcctgaccaacgtggtgaaaccctgtctctactaaaaatacaaaaattagccaggtgtggtagtgggcgcctgtagtcccagttactggagagactgaggccggagaatcacttgaacctgggaggcagagtttgcagtgagccaagatcgcgccactgcactccatcctgggcaatagagggagacgcttgtctccaaataaagatatttgatgacctgaattagcagctgccagtcacatggggcctatcctctctaaccccacacctcctctttagggttcccccagggtcctggcacagtgaggggtccacacaggagctcaggtgctgtaggagcccaggttgtctgcaggtcctggtgtgtgaccttaggaagtcatgtggccctcccttaagattgttccctgtactgggaactgggggtaatgatggagctgtggagaggattatgtggaagggtgaattttggtggttggcctaggaatggccatcataaaggctcagcaggtgtttactgggtttttgaaacctgaaaagttagcctttcatttcttcgattgtagtcatttctaatgcatgtgtcttcctgtatttctaagcagaacgtgctggatttgatgtggcctcccccatggtgtcagctgctgacaagattgggctgcagtggcctctgtgggcgggtagaggctgctggcccacatgagcatggtactaaggtctcctaggcttgtctctactaccctcagccaagctattctgcacgcccccgagactggcccctgtcacagtgaggtcctctgggcctccctggctgggccctttgacttcaggggctgttgcgttcctagaaggcgttctggcagcgccggctggccgccccctggctgtgctgatgctgggggcgggcactgcatggggctcctctgctctagctggggacctgggactgctcccttctgtactggggaaaggagagcaggcagggatgggctcagaggtctgggccagccacacagactctctctctttttcctgagctctttagccagcactgtggcagtgctcaccataatggattcccagagcggtcgttggacctgaagtctccaggaagaatgatggctgagtttcaaaaatcccatcccagctgctcacctccacggcctctgaggcagagaagcagaatgtgttctgtcttcctgggccccacaaagcaggctctgggcttttctctcacatcccagccaagaggagctcaagttacatggcgggagaagtgtgatggatgctaagaagggagttgagggaaccgcagaggggctgcggctggcgagaagcaggtgggcctcagggcatggggagcggggtgactcgggaggacaccagacaacccccaggagttcttcagtgttttttttttggagactgagtctcggtctgtcatccagcatggagtgcagtggcacaatctcggctcactgcaaactccacctcccgggttcacgccattctgctgcctcagcctcccgagtagctgggactacaggtgcccgccaccatacccggctaattttttttttttttttttttgtatttttagtagagatggggtttcaccatgttagccaggatggtctcgatctcttgacctcgtgatccgcccgcctcggcctcccaaagtgctggaattacaggtgttagccaccacacccggcctagttcctcagttttggggcacagcctgtgtctagacaacagagctctctttctatcagctgagtgtctctgagtgaacaccaccccttgggaaaggagggaggactgcgtggggtcccagtgagcagcccccacgtccaggttgcagtgaatgctgccagaattgtatgtcagcacacccactacacaggggcctgacacacaagatattgcccggactggcctgggcaacacagcgagaccccacctgtacaaaaactttaaaaatgcagtgagccatgatcgtgccactgtgctccagcgtaggcaacagagtgagagaccctgtctcaatatcaaaaattgaaaattgaaaaaaattagccaggtgtggtagtgtttccctgtggtcccagcagcttgggaggctaagatgggaggatcactggagcccaggagttccaggctacattgaactatgatcacaccattgcactccagcctgacaagagtgagaccctgtctctaaaaaaagaagttgctcagtggtaggactaacttggggaactgataactgtgtcctttttctctgtcacaggatttttctttttctttttttttttttcttttttttttttttttttgagacggagtctggctgtcgcccaggctggagtgcgcagtggcacgatctcggctccctgcaggctctgccccccggggttcatgccattctcctgcctcagcctcccgagtagctgggactacaggcgcccgccacctcgcctggctaattttttgtatttttagtagagacgaggtttcactgtgttagccaggatggtctctatctcgtgacctcgtgatccgcccacctcggcctcccaaagtgctgggattacaggcgtgagccaccgcgcccagcctgtcataggatttttctaggagtgtttcttgaaggcaggtagagagactggatgaagcatgaggaattgctttctggcttgactcacttcactccaggtgctgcctgaagctggggtgcctcccagcctgcagactgcctcctccttttccatgggaccctcttcagcccctttcattgttgggcagctctggtctcccacatgaccttcctagagctgttctcatcttgagtctgcacctgtctggggggcctctgtgcaggctgctgttggtccctctgtcagggggtgctttaaggctcagtgggtagttacttgggtaaaccctttctttcccccttctctttccctgctttgtcccagggtagcatctgagggaggaagtggagttacagtgatatgggttagctccccaggggccagcctgggccattggctccattagcttagtggtttaaagcagcgaggtattgacgtttttcagtctgtcagttctgctggttggctggtcccgcccagctgggcactgttgctggggccctctggtctttgcagttgcatgtcagctgggctgggtgtccccagtggtttcatcactcacatgtgatggccaaaacagctgggactggctggaccagtctctgtgcctgtctccatctcccccactatagcgggggctagtgtgggcctctgatcccgtggtggtttggggcagtcagacctcagctctcctagagcaagcattccgagggctcaggcagaagctgcaaggcttctgtgacctcacctgaaaaggctgccacgtcacttcctctgcattctgtagtttgggaattgagccataaaaccagcccaggtcaagtactacgggggctatgagtagatgcagccagagcctccggcctcctcaggactgcagagatgggccgggggccttgcagagtttggtctggtgtacagggtttgtcagccatgagtattagggctccttcttcatatccacaaaagcgcttggactcaaaaaataggaatttggcttccagggtctgttgctttacaaagacgcacgatgacacacaattcagaaatccttgtgagtgagtttccctttcctccagcagcacaacatctatgtgcacgagggaagcagctgcccaccgtgcaagggggtccatcagtccgtggcgctggttcctcctgaactcacagccccaaccctggaacctccatcaaggcaagaggaggaagtgggcgctccccagccttgccaggcccccagcagacccagtctgcccttggggggtttgtgaatgttcaggtgtcacatttcaggacctgtttactgagattgtctgctctgtaatgggctcccactctttcctcagaaagctgtcaggtcaggcagatgtttcaggtttgccattgcttccatctgggagctgcaaggcgaaggcacgggcggcctgtttgctgcccttatcttcccagtgttggggaccccaggaagtactgtcttctaaggcccgacaatccaaaagaaaatcactcctgcatgctcctatccccttcaaggttgcatcctgtcagagcatccatcttgcctctggaggccgtggtgctgctgccatctgggttttgggggctgctggatgtgggcggctggctctgaagaggcagcatgtgatctgacagcaggatgctcccgccccaccaaatgacagccttggggcagctcccggcaaacaactccatttccttctccgaggtgggaatgggacctggtgcaggggacgcaggctgtcggggcaaacctctctctccattctaggggcatgcagggtggctatgagtgctctcaggaaggtcactgttcccgaggcctgagctgagcactttcagatcagcagggctgcctgatccccctgcagccagccggctgtctaaggtgcccgagcctcctcagcactgaagtctcacctcaccaggcagccctgagaggctgcgggacagggattcctctgccctgccatgcaggagccatggagagggaagtgtcacttgcaagaggcagaatcaagtgagacccaggtgtcttctagctcactgggtgagggctctctccacagcctgacttgccggcagtcgtttgaagtccaaggctgggcaagggtggccagtgagctccaggcctcagcttgctaaaggagctactccacaggagcatgcgggctcagggctcagcaccctcacatgacaggctcagccagcctctcccccatccccagccatcatagacttaggaggagattcctggctctgaggacatgggggcttgcccccttctctggggctgtggtatcaccccagggctggatacccccttgccctttgttcatctggtcctgggaacaccttgtcccttgttgggagctgaggctgtgccacagagtggggccataggtccctgggtgctgtgccggtgccacacccacctgaaggaggtcgtgatggcccccagctcagggtgcaggaacctgcttgtcagacaggtgctgacatgtcaccctgcaaggcagggggagggagggctcatcttcataggggggtggggtggggtgccgtgcagggagccaaaggcacttagatgggcttgctgggccgagggtgggtgggccagtcactgggctgggggtggctaaggaacacagacccaccagccagcccttcttgggaagctctggggggtttctgctcagacctgcactcccccgagtggaaccccgagttctgccatgaccttcaccccgaggcaaggggacagggccgggcaggcttcctgaggcatgttgaagagggatgttctgcaggcagaacatggccatgctgggccatgtctgtgggccaggccccaggagggcgggggatgttaacagcttggttcatgtcaggtagggcctggtgagcccaagatgagtgtttgcacaagggacaagtgagctggcagggctggtgttggctctagcagagccctcatcccacccttgcacacagccagcagcccaccctgctaggcctgaaagaggtgaggaggaaaggttctagtgggaaatggttctgtggctggagaaggcattgctgggccctgcctgtctccccaagccagcctggaggaggatttcttgtaccgaggcctcacgagctacaggtcatggtcatccctaacttccctagtgtgtgcaagacttgggggatcttgctgaaatacagactttgatcaagcaggtctggggcaaggaggacacgcttcatttatacaagttccggagaagctgccctgctgctatggcggtgacagcggtggtcagacattcacggggccagccccaagcccacctacagccttgcccccacctgccgctcccctgttgtgtctgtccatcctggtagactgaaccctaaggacagaaattccttttatccaggggttcctccccactgcctgctatagcacctgctttttaaatgagctctcagcagatgtaaggaatgaatgaatgaatgaatgagggagaggggtatgtctttcctgcataccaggcaggcctgttcagagaaccacaaaggtcccagcctccaaggacagctccttcccggcactggctgaggggacactaaatattaaccacgtactggccgctggttgctgagcagctgaaagccataaccttttgctgtggaagtgggatcgtgtctcaatttaagtttataatcccggcctctcctccaggaaattctatggaagttcctggcaggtaacagaatttctgtgcttgtgaggtcagggccagtgccagcgggtcagggagtgggggtggtgcgtgtcagcgagcgggtgagaccatttacgctgataacagcctggcctgcttccagggatttttgtaggtcacataaaatctcttgatcactacgttttacattaaggcttctcaagatgggcaggacgggcttatgggatttgtcctgaactatcacatcacttccaaataaacttggtgcccgggacggctgctgtggagtgaatggcagacgctgtccctgggccacgatgccatccctctcagcatgttgggctagatttccactggttttgtttactttagacagtttttataattaaatatttccctgaaataatgcctgcaatcattttgagccacatgctctttttcctgaattaaagatctcttttagaaagtactgagactcttaaagcctctctcctttaaaaagtgagcttaacaaagtttttcattttagaaacttagaggggccagtgaccctgctgtgtgcggtgtatgtagaggtgactggagcctgtggtgcagcaacagtcccctgtgggctggcgccacacaggaagtgcctgcagctccacagccctggggtgagcctggcgcctccattttctgacagtacctgaacctttacctcccttctcaaaatgaaggctgcgtgtcacaaaccggttggaactggccgttgccatggttttcacgttggaaggcacagttaaagggtcatgtgaccaaggagggaaatgcctttgtcacatgactttttggtggcctgattagcatacaggaagttcactccctgctggctgctgggatgctgagtgatcattgatgggtggtgacatcatctcttggatgagttattgattagtcgcaggccaagatggggccagggagcgctgtgggcagagcagccctctcaggcagcttcagctgctaggtggtctggacccctcgcctaccctcttccttcaggcaggtttgaattttattagacatctcacctctggaagaagcacacgccctcaataagatgataagaagggttaagtcccttagagcttggctgtcatttcatttcagctcatgctagcccaggaattgtgtctgtaactctatacaagatgctgccttggccccctgctcccctgttcactttggaggccacctgggtggaggccagctgctgcacctctgtgctgaagccttgggactgcctgcctctgaggtgctcagtgtgtgtacacgtccagggaacctggaattagagccctgaggtcaccttgaaagtcgatcttgggcggcatggggccggcagcaaggagagacatgctggcggtttgctaagacctgagtgaggtgtcctgggttactttagaaacaaactacccggttctgggcttcagaatgtgggctgataaccccttgcctgggggattgtatacttcgaaatcgtacctttctgtccacgcccaggtctctggtgagaagctgcttcatcagggctaggaccagcgttcaggtacagccaccacgtagctgtggtgggtggaattaggagggaccagaggagagcaagtaaagcggttcctgagtccagcatctggcgagtccagggtagcattggtgaagccttaacctctggtgctctgtgtctacccttccctgaggacgcagctcatgggtgtggaggggacctcagaggtcccgagggctgctagagcagagtcaggttcttcatcctagcgactctcctcaaccctgccggggtctaattatcaactagaccctggcacagcaagagccaggacaactttgagctgcggcaaccagttaactttgtccgagtttgttctctgggtcacagtgccacctagaggacgtgtctgtccttggctggttttcctgctgacaaaaaaaatggacttgattcacttcgatgaatgtacaatgaggccgaggcgggcggatcatctgaggtcaggagttcaagaccaccctggccagcatggtgaaaccctgtctgtacaaaaatacaaaaaaaaaattagcccggcatgatggtgcatgcctgtaatccagctactcaggaggctgaggcaggagaatcacctgaaccggggaggtggaggttgcagtgagccgagattgcactacggcactccagcctgggcgacagagcaagactccatctcaaaaaagaagaaagagaatacaatgaacccagatcatcagggacagtttgccttgtgccgtcagcaaatggagctgcttggttggggacaaagtgccatctttgggacttgcgttgggtcagcgacaccacagcaggtgttcagccttgcgccttcagtagtgtcagctgtacacatacatcctagaggatcgttcacaggaaagggaaaatcagactagtgtgttcctgcctgggtcaaatgacttggggtgccttgagcacttgtctcggagcctggcctgcagttagcacagaatggatattcactgtttcccagttctgatgaataacagcagctcatcagccacactcttagacgtttgtgaccatactttgacaaaataacaaaagaggaaagcctgcaagtacttccccgattgtcccctggtgcttcccaactggtagtgagatgccgtgggccgacggtgaaaaggggaggaacaggccttaggtcaagttcacaggtggaagtgagctccccagaccgtggcaaattcattagaaagaaaaaggtgtgggggctggaatcatgagaactgtctcatgttgcagttttgagctgggacttacggagtgggcagcagggtaacaggcagaatgaccttggcatccacgtggggctggaggcagccagccagaaaccagtccatgagtagatcaggcaggtgaagagtctctggtctttgagagaacttgtgtcctagtcagtttcaaaacagacagccactgccgccatgtggggcccaagaagggccatctagcacctggtgccaccttgtgagcaagctggcagcctgtggatacacccctcggtcttctggggacaggttggctgccaggtgtgagggctttggcctgcctgagtggagagaagaaaatctggttcacgcagggagctgggctccccttcaaggggtttccaccatggccaggggctgcgggctggtggcgaggcacacacatgccatcagacccagcatgctcaagcccccacaatggctaacactgagcagggccccaggatcccgagccgagtgtttacctgatccgaggcacacggtagagggagcagccatgttttccaaagtcaccatgtcatgctcaggggcatacgcaccctcagccctggcgacatggcggcaggcatgaagtccctaccatcagggtgcccacctgggcactgggattgggtgccctatgacgtgtgggtaagaagaaggaggcagcctgggagccatggggcagggcaggggatgtggaggatgcagggcagacagggaacagacggggaggtctcagctccctgccatgtgtccacaggggtgggcactgggtccagctgtcaagggcgctctggtcactactgtctccaccccacagtgacatgaagtccgagaggagacccccctcacctgacgtgattgtgctctccgacaacgagcagccctcgagcccgagagtgaatgggctgaccacggtggccttgaaggagactagcaccgaggccctcatggtgagccacgtgttggcgctgccgccggagccccactgtgcccttcctactcatgacaccctcaggtggagctagtgatggcagggcctctgctcctcaccaaggacgctccctctcaaccctgttcctctcgcccctgcagaaaagcagtcctgaagaacgagaaaggatgatcaagcagctgaaggaagaattgaggttagaagaagcaaaactcgtgttgttgaaaaagttgcggcagagtcaaatacaaaaggaagccaccgcccagaaggtgcgtgcctgtctcccctccttcctgggccagcaggagcgcctggccttgccttgatcccctcatcaatgtcagcggccagaaaggtgaaagggcttccttgagggagtatagggcaaggtcccactcccgcatttgtggactccagtgtgcattttggattcagcttacaagatgttaaagtgaatttcagtctagagtattctggttctgagggtctaaagctcacttttttttttttttttttgagatggaatctcactctgtcgccaggctggagtgcattgacgcaaccttggctcactgcaacctctgcctcctgggttcaggtgattctcccgcctcagcctcccgagtagctgggactacaggcgcgtgccaccacacccagctaatttttgtgtttttagtggagacggggtttcaccacattggccaggatggtctggatctcttgacctcgtgatccgcccacacgggcctcccaaagtgctgggattacaggcgtgagccactgtgcccgccctaaagctcacttagacaacaggtgtcaaggaagtggagcacagatgtctggtgccgctggaagcatgtttctgggtgaagcactctgtgcagaaaggccgcctgcactgtgggcgcaggggatgccccagtctctaccatcatccctcctgctgtgtgcgtctcagtcccctcccagctgcaagtgtgctgagctcccgtggatctcagccccaactgtcgggagggtcctgcttctgtttcttcttccctggagcccgaagctcgctgttgcgctgcttctagatgcagcttaatgggcagcgaggttaagtttattttgttaggctttttgagtgctctgttctgggaaactccgaccttccaagtactttagtcattgcctcagtgacccagaaagtaagtgtgttctgggcagcaggagctgaaggaaggacaggactctctctgctctggcttggggtttgttttttgaaaccctgcccccactgcccccgcgccccctccccgccccccaccttacacctacctagttagcaagtggattggaaagagcctgctggtttcttttttctatttctttgtcacttgtcgaaaactcatggagggacaccaagtctgtcactggcccttctctactggaacatgcagctttaaaaagtgcccagagtcaccgttttctcactgagattgagatctccctgtctgggccatgggtcctttgcctcagcagtgctgccaccatcagccattctgtcccctagagggcacagcgggtgccaggatactgcgtgggtgtcagggagcagccaagaagtgatgctgagagtagggggtggggctgctggaaaatctcttctaggcccatgtagaaattgtcacttcccactgcagatggggtcactttcagccttcaagcagaacctctgagcgcctgatgccgtagaggaggaagacagtcagtcctcttcggcagcattaaatcttggcaactccgtgtgaggagagggaccggcccggtggcccctcacctcctggtgtcctgctctcttgcagcccacaggttctgttgggagcaccgtgaccacccctcccccgcttgttcggggcactcagaacattcctgctggcaagccatcactccaggtcagtgtcctttctgcgtctcactgggtgccctgctggcactgctgctgtcaagcacaggctcctcgggctcccaaacagccctggcccaggttctgcaagaggttgcgctttccttctgagtaggctggagtgaggccctccagcccacagcctaggggaagaagcacacgtgcactttccaagccccacggcccaaagtaggccactgttaatgtcacagacagaaatcatggccaacactggaagggggctttccagtgagcgcccctagcaagcctgatctcccttcgtgttgactcttccggccagagagcctccttccagggcctccaggtgaggggcagaggttttctcccagccatatggctgaggtcagaagaggccctcctgcccctccctctcaaacaggcctgagccctcagcttgctctagggggtgaccatgcccatcctgccgtgggccggccagtgtcacgtgagaatgaactgccacgttggtgggactcactcaggagtgagcccaggtttgcacggctctgggtggagtcactattccttgttccagtatttagaatcagtagtcatctttcttaattttgtgttatacgtttgccttgttagtttgtttgagacagggtcttgctctgttacccaggctggagtgcagtggcacgatctcagctgactgtagcctctgccttctaggcttaagccatcctcctgcctcagcctcccaagtagccaggattacaggcacacaccaccatgcctgggtaatttttccattttttgtagagatgaggtttcactgttacccaggctgttctcaaacccctgggctcaagatatccacccgccttggcctcccaatgtgttggaattacaggcgtgagccaccacacccagccagcttttttttctttttttctttttttctttttgagatggagtcttgctctgtcgcccaggctggagtgcagtggcgcgatcttgggtcactgcaacctccgcctcccaggttcaagcaattctcctgcctcagccttctgagtagctgggactacaggcatgtgccaccacgcctggctaatttttgtatttttagtagagatggggtttcaccacgttggccaggctggtctcaaacttctgacctcatgatctgcctacctcggcctcacaaagtgctgggattacaggcatgtgccactgtgcccatccataattttctttaacttctctgctacttaaaaaaaaaaaaaaaaaaaaactagtatgtactttcataaaagcagcaaaactgcttgctttaaaaaaagtgtgggggggtccggtccatgtaaatctgggtcttggtatcgttggcagacctcttcagctcggatgcccggcagtgtcatacccccgcccctggtccgaggtgggcagcaggcgtcctcaaagctggggccacaggcgagctcacaggtcgtcatgcccccactcgtcaggggggctcaggtaagcagggctgtgcacatgggggagacctggcagcctcagcagtcgtctaccttgaaagtagggcccttcccagtccttgggggcaaggtgccctgtgccttccggtcccgctccattgttgatctcagtcagatttcttgttctccccaccctaccccaacagcaaatccacagcattaggcaacattccagcacagggccaccgcccctcctcctggccccccgggcgtcggtgcccagtgtgcagattcagggacagaggatcatccagcagggcctcatccgcgtcgccaatgttcccaacaccagcctgctcgtcaacatcccacaggtgagggctgcgccacactgtgccagggagagtgtgtgtcccacctgtgactgctccccttggacccaggttctggggcacagtagtgtttccctgggctgtgtggcatgacctgccttgctctttcagagccaggcaggggcttggacttgagctcctgggggccacagggctgtctgggtcgtgggcagaagttttgtgggcagacttgctatccagcacaggtgggcagctgacgagaggggcgatgcacggacctgagctgaaggtggggtctgcttaccagccccatggctgaggaaacagcatgtggcacacagcaggtttagggggatagtcgaggcccaggagaggccggtgatgggcccggagatgccttggggggcaccggagcccatgccgccctcccggcagtggcttcttccgattgcctcctcagcaaatgttctcatgtcaccaggtgcgcctattcttagccgcacgtcccttcacctctgtacagagcctctcagatggggagggtctgtccccacccactggaagtaggatgggaagagcagaaccaaggggcgggtgggctggaaacaggcgccttggctgacagataaaattaccaggtctgcaggggcttttgttggtgggcgtgttcgctctttcttccctctttggcacagtttgttcttgcccaccctcctcagacaagagcaaggctctgggcagtgtccctgcctgctttcgaaggtcaggttcgagtgcagagaagatggctagtcctggactgacccaggcaggtagtttcatacacctgttgactttttttcttttttggagacagtcttgctctgttgcccaggctggatggagtacagtggtgtgatcaaatatctttattttattatgagacaagagtctccctctgttacccaggctggagtgcagtggcatgatcttggctcactgcaacctccatctcccaggagatactcctgcgtcagcctcccaagtagctgggactacaggcgcctgccaccatgcccagctagttattgtatttttagtcaagacagtgttacaccatgttggccaggctggccctgaactcctgaccttaagtgatccgcccgacttggcctcccaaagtgctgggattacaggcgtgagccaccacatcctgcccacccgtgaacttttatccagtcctttctcttgtctttgtttcctgagggtgggcacaggcagtcagtggcagagaaggtggtctgctcctagcgtggctgggggaggctctgaggggaaggaggaggggaactggctggtcagaggtgagggaggcctgggtttggtcttggttgctgaggggacaacaaaccagcaggccggtctctgggaacctttcttggggggtgggaccctgggaaggcatcctgcacaccctgtgccccacagtgtggcatttgcaagtcattgggtgtgtccattttctgggggtggggtgcacagctttcatcatatttccagaggggtcctcagcccctaaaagcaataacattggcatgtgggcagttctgggtttcagggagagccctatccagcagttgtggggctggtggagacagtcaagggtctgctcctgggatccaggcaggactgtgaggtggcactggagcggtgaggactgggtggagggcaaggggaagaggttggcctaggagctgcttcccccatcgccccataaggactcggggactacctcaaacattagcatcccaggggagcacatgcagagaggctcatgggggtgctgcggtgagcaccctcttaccctgtgagaaggcagtaggccaggccacagccagaggacagtggccctgctgggcagtgtggtgaccaccagaacctggtgacagccacatgggtgccctcacattcacatggcggagcacagcaaactatagattttaagtgtgtgcggtttatctggtaaacctcggtgcacatgtgcagatgagcagccactacctagggtggtgtgtttctcgcgcctctccctgctgccctggcttctgagagcctgttatcatggctgggttcacttttgttaaggacgccatcgtcaagggtactggttagtgcagttgacaggacctcgggcttcggggcgctggggagccttcctctgggcaggcgcacggagcgccctgactgagtttttgtctcccaaagcccaccccagcatcactgaaggggacaacagccacctccgctcaggccaactccacccccactagtgtggcctctgtggtcacctctgccgagtctccagcaagccgacaggcggccgccaagctggcgctgcgcaaacagctggagaagacgctactcgagatccccccacccaagcccccagccccagagatgaacttcctgcccagcgccgccaacaacgagttcatctacctggtcggcctggaggaggtggtgcagaacctactggagacacaaggtgagtggcctggacccagccgggctgcttccgcctctggcctccaagggtgctgccccgtgggttctttccaacacacagcagaggctggggcagggctgcctagccaggatggtcctgggtgggcttggcagggacaccgtcagtgccactgtggagtctggacactgtcctccggttggggcctctgagagccaggccccgagaggctcagggtccagggggacgggcagtagtggcctccgtgacgttggcgtgtggtggggtagacgtgagggtgcacatctgtgggaggctgacagggttggcctccacgaagggctctcaggccaatgtggagttgtgacacacaggcagaaccttccagagcctcaagtgctcccagcttctgaggagggagagggacagcccaccccactgcccaggggcaggctcgcatgatcaccctcttcaggcagcgtgggagtgcactgtgtcctgggggatttaggaataaaaagacatctacggggtgatcacagcattggagacggctgggcgggtggatctgagtggccgagttggcccccagggagcccctgctccccagacatggagaccaaggacgtttctgcccacaggttgaggttggggtgacacgagtaggccaggaggctgagtcctctcctggtgactgcatcagactctcagagcagaggagtcggcaggactgtgaggggcccagggcaggggcagggcctggcagcctcagagccttcccagcacagacttgggagcagcggggtgggtgtgtgcagagaagcacctcccgcgcactgcccaggatacagagggaggagggcatgggggccaggtcgagctgtgcccccagcacctggggttgggaagatgctctccccactctcttagggtactttggtgcatcaactggtgcccccatgtggttgcacccagggtccccaagaggcagagctctccacacttgcgtggggctgggcctggcgcagcctcagagtggccctcaaatgtagagttgcttgtaacccactcccttgcccctcagtcgctctcgtaactcccggccacaggatggtaccgagactaactgcagcgtgccccaagggcatggcctccagctcccagctgcaggagggacctgggggagctatggggaggtgaggctctgacacagcccggctggtgcctttggtgcctccttttcgacaaggtgatgtcggcaaaagagccacctggggctgctgtaggaaatgaggattgggggccgagttgggaccagtgcctctccttgcccctgcctgtgcgggcatccgctctcccagaccagtctgtctctgccgttccctcatcagggctcagtctccctctcctgttgccaaggataggacctcactgtgggagagactttgagccctgctggaggcatctcctgacacctcccagagcccccagcctcgcaccatgtctggttctggcgccgctcacgctggccatgggttggacgtgtgcaaggagatgtgccgttgtcaccagagcatgtaagctgcaggtggcggtctcatgggtcaggggcttagaaggggccaggccagtccaggcaggagagggaaggccgagagtctcgccacatccatctccccaccccccagcccctgcagtcctctgacattgtctgtgatgaccaagagcaattaaggcccctaagtgctgaacacaaaaaaggtcggcacaaatacgcccagacctcacgcccgagcacatgcttcatgtacacttccccagctacctcttgcagcccccaaggagactatgcattctgtcccccagacaaggggaccaagcccttgctgcccctgtagcctgctgcccaccttgtgcagtgggtgcagcccaaggcctggggcctatcccgggtgtgagtcctgccctgccactgagtgacaatgtgatctacaggtcacttggtctctcttggcctcagtttcctcatcaggacatggcgcatttgggggttccccgtcctaagaatgaactgagtacctcagcacccacaaagcacttgctgggtgacttgcctgtcacccttattaactcgtacacaagcaagggtgcccaccacactgaggcagggcttggcatggtccctgctggtcctcagtggtgtcatgtccagcgatgggtgggacaggaggccgacgttttctgaagctgttcggcgttggccggccccatgtccacatgtcattggtgcccagtaggcatttgcagaacggacagactgtggcgactgagactccagcatcctgggctgggggcggccagggccctgactgtcgtcctggccctctgacgtgagccatgtgctgtctgcttgcagcaggcaggatgtcggccgccactgtgctgtcccgggagccctacatgtgtgcacagtgcaagacggacttcacgtgccgctggcgggaggagaagagcggcgccatcatgtgtgagaactgcatgacaaccaaccagaagaaggcgctcaaggtggagcacaccagccggctgaaggccgcctttgtgaaggcgctgcagcaggaacaggagattgagcagcggctcctgcagcagggcacggcccctgcacaggccaaggccgagcccaccgctgccccacaccccgtgctgaagcaggtgagcctggcctgctgccggcagtgccgtccctaggaggcagaggccgttccgcgatccaccccacgcctgcgctgcaccgcctgattgttaactgcacgtctaaattgcagttaatggtggtgttgggcggcaaaaacactaatttgcagtttctttagactttgtagctctcacttgcaggctgccggctgacaagtactgcttgtcttcaaggtcttttctgaaagccacgttgagataccaaaggggcgtttggaaaaatgttcttgctaaatttggagaggaacaagtttgaaatcaagttttttgttctcgtgttgttttattttaatgcttctccttcccaccctcttgtagactcgaagctcccttttggcaatttttgttttcttggaagttctttgcaattcactaaacgcattttctcaagatccccacttggcgcctaaagtccccaggggacgggcctgtcctgtggggctcaccctcggtcaccctgggccggccagcggaccgcactgactttgctttcaacccccgtttgtgtaggtcataaaaccccggcgtaagttggcgttccgctcaggagaggcccgcgactggagtaacggggctgtgctacaggtcagaaccgcactgggcgccgggagcctcgcgcccccaccgcagcccgtgaccacgtcagtcgccgactgtcacgctgcctcttctgtctgtctctccctgtttctgtttcactctctcccctcccccacccctctgtgtaacttacctggtctcctgattttggactttagggaccccatgtgggtgggaagaggtcagccagagcaaggagaggctgcgctgagtgtctcgcctgctgctgtcttttccctgcatgagccgtcacccccctttctccactgcaggcctccagccagctgtcccggggttcggccacgacgccccgaggtgtcctgcacacgttcagtccgtcacccaaactgcagaactcagcctcggccacagccctggtcagcaggaccggcagacattctgagagaaccgtgagcgccggcaagggcagcgccacctccaactggaagaagacgcccctcagcacaggtgggtgacctccacagggctccccaggggacctgcccattgtggggttcacccttccttaaccgaaacagaggcacatgtgcagcgggtgaacccccaggcccgcttcccaagctcagcctcctcggactctggctttccctcctgcccctaaccaggataccctgaagaagtgacagccccgagcagataggaaatagtaaccaccctcactctctgcacccaggctcagtctttgaccgacaaaacatgggccaggcctggctcagagggtgcccccacagccatccatgtggactcttgtcagcacacacccctatcttgcccactcagggtcccccttttctctttgtgccgcagcaaacatcttttttctgtcattgtgccatccatgctgcggtcacactgagtggtgcaaagtagaacagtaatgcggggcagggggtgtgcccagggcagcggctggctcacccggggcaggtagtggaggccttgccggagacggtgtttgaagaacaaccagtgggggtgaaggtcctccagtgggctctccggagtcaggtgcggccccaccgtccctggcatggtcccgatggcctgtttattttttcatgtatgtgttaacattagaacaaaagtgttatatttcttgtgtcaaaaatagggaaagaaaaggtggtcaggaagggccaagttaaggagatgggcaccctctgggagaggaagcaaagtgtcccacatgcaccctgaagcctgtggccctgcaggtaggagaggacaatcatgagacaggccccaggcagagtggtggggggagcctgagagcctgctgagcctgccgctgtcctaagtgaggggcgtgcccaggtgccaggctctgcaggggcacttcaggaaacagcagacgttcggctgcagaggaatccaggcagcctggacagttgagtgtgtttgtcatcaaaccagccagccagacgttctgctcagcaggtttaagacagctgaggactcacgggctggtcagaaattactcttgtgggaagtttgaaaggataagaaagaagtagaagtcgataagtgtgtgcatgtgggcacggtggtggaagtcatctggaagctgtgtgtgtgtgtgtgtgtgtgtgtgtgtttaaagtttgaaagggagcatgaaggcatcactagttgtgtgtctgatggtaggattagagggaaaataaatagttgaaagcaccatttcctaaaagagttaccacgggggttttgagagagcgcctggcaggacccagttgccaggtttctggagtgctgcccttgcacacagggttggttcctaagaacatttgacctgggaacgctttttccacaaaatgtattagccaccactaaaaatactcttagggccagacatgctggctctcacctgtaatcccagcactttgtgaggccgagatgggaggattgcttgagcctaggagtttgagaccagcctgggcaacatggtgagaccttgtgtctacaaaaaaataattagccaagcacatggcatgtgtctgtggtcccagctactcagccaggaggctgagggaggaggatcgcttgagcatgggaggttgaggctgcagtgagcactgattgtgccactgcactccagccttggcaagagtgagaccccatctcaaggggtctggggcagcccttacctccaactctggccaaaaattctgcgtgtgctgggtgggggcatttatttattttccaattataaaaatgatatttgtccatcatggaaatttggaaaatacagagagaaaagactgtggcaatggcttgtattttcctcccccaggtgaacaaatattacatttaagggttttccccagtgtctccccttcacttgagggtcctttgtggaaatgtgtgtcttgcgttggctactttgtgtgttaatgagagacccttactggacgcattaaaatttgagctgggcacagtggctcgtgcctataatcccagtgctttgacaggccgaggtaggaggattgcttgaggcctggagtttgagaccagtaaacaacaacaacaacacttgagggtaggagatagtttttttttcctttttttttttttttttcttcttttggagaagcttcttgctatgttgcccaggctggaatgcagtagcgcgatcatagctctcttgcagcctggatctcctaggcccaagcaatcctcccacctcagcctctggagtaactgggactacagggatgtgccaccatgtccagctgatattttttttagagatggggcctcactatgttgcccaggctggtctctatctcctggcctcaagcagtcttcccaccccccagcctctcaaagtgctgggattctaggctgagcctccgtgcccagctaagatagtttttcattgctgcatagtattccatcctgcattattgtcctgttgcacacatttgtttatggttttccactgttctaagcagcaccgtggtcagcaccttcatttctgtagaacgtaggtagctgctcaccctctgatgattgccccacacttgggattaccttggcagagcctggcaatgtcaaggccattgagttgctgcctaaatactcttcagctctgggggggcctgggatttgaaacgttgattgaggagtagtgtgggtgggtttgcaagggctcctgggtccttagtctgtattggggctggggtctaggcagctatggctgggctcctcccaggagccctcctgacgagggccttctcagctggtcgctctgttctgttgcaggcgggacccttgcgtttgtcagcccaagcctggcggtgcacaagagctcctcggccgtggaccgccagcgagagtacctcctggacatgatcccaccccgctccatcccccagtcagccacgtggaaatagtgcgagccaggccccgtggaagacgggctccctcctcccccacctggcccctggtctagaaggacccactgcaccaccctccgctggctcgggaagacaccgtgcccgccccaagagcaagcaccggccatgctgcagaggcaagacctcaattcttggctgcaaagtttcatcagggctagggggctggtgccgcctcataggcagacgaggatcatcgctgggggacctttcccgtgggctttcttcctttctctctttgcctttagtttgcccgacaccagcagaaaagtggaccttgggggctggttctgctcctggcccccttgttcagcccctgccggcacacgggcggctcaccctggacactgtgatgcgcatgggcaaggccagcgcccggggcttctgaaccgagcggggtgtttcatttttttgcttttccctgtcttaggctcccagtctttgactgccttcccatggcgatctataagttgaaagattttttttttttttaatcacctcatgatgatggagttaaaagtaaaccgtgcagaccctggggtccctgttgtacgctgcatcatcccgctggccctgtgccctggagggtgggcggctcatggtgccacagcccctggcagggacggccggcccgcccccgtgactgactgacagatgcagggatggccgaggcagccctcgctccagctgaacgcctccattgctgcttgttctggagacccccgcccccgcaccttccagacttagcagaagaacaaactgaagaacagacccagccagagaagcagggattccagaagctgcccattaagggagaaggagaggatccggtcggcagcagccctgagcagaaagctggaggggggactgtcgcggggtttttctgttgtggtttattttattaaattttttccttttttctattcatttcgatggacgcaatcttaagccaccctggccttgctcctgggaggtgagcgtgcacaggtgtgtgcaggtcaggaggtgccgtccaggtgtgcggcgagccgctgcgcacagatgtcaggatttccgtttgggtctagtttagaacctgtccttaaacctaggggttgctgtcaggatttgctttcagactttttttttttttgtaattccctttagagtctacaaaaatgtttttaaaaggatcaggtctgcttttagtttcatttttgtttctttcccgtcccactctttaaaaactggttccgtgaggaaaggcagaagccgttccgtgtctcttgcaggctgggccggcttcatgccagtgcgagggcgtcccgtgcccacgtacatacgtatgtctccatgagttctgggctccaccagttccaattgagctccagccctggttttcctacccatgcagttagggactttaatttaattttttttttgtagggccaccgccttcaaacacaactgctacaacattctaataaaggctcatttaacccccaggctcctgtcgtgtgaatatcctcagtctgtaggaaactttttttgacacagcatagaagacctagttttggaaaacattatctaattttttgttgtgcaaatccccaaatttctcactaatttttgtttttttgtgcataacttggatgggctgaaggaggtgaggacagattggggaagggtggctttcattccaagatccagggatttggggaaaaggaaggaatttgatgttttttggggtgggaggggagggtgtgttttttacaccaaaaaaaaaaaaaaaaatcaagagtatgcaagcatttctattcctcgcatttttctgtgtgcctggcaaataaatacctgtctcctacgaccctgagctgttagccctctctgttccatgacaggggccagatcttccagctcctcccagaaggagcacccaggctggcttcttcccactgaaagccctccccagcgaaccaacctcagttctatgcagtggctggggatcaggcatccagaccgaagtcacctctgcctgctccagcttgggtcagctgggtctgaccagggggccagatccgagccgcacctgccggcccccagccccagctccagctcctgacctctcccagcctggcctggctgttcctccagggctgatggctgtcaacccatccttgtgagttcatatggactgctgcccctcgaaagggagagggtcggccccatgtccccagggagcattccatcagggacaacgtacatactgtgatgtaaactttttttttttccccccagggggcaaaagtgtgagatgccttaatctttccttcatttctgctgtctcgaacactctagcccattatttcctttcagttccttgcagcataacctctacgataagccccaagcgggttgttgtattatgacgtttatgatgttccaggtgaaggcattattaagtacctctctgggtgtggggtttggacgcaccaggatagctattgattaatgttaagggtgttctacccacagcaaagcacaccctcttaaaccaggcactgcctgggtcctggtcccgagagccctaccaggatcaggttcctgcaagccgtcagaatgtgggagcccccagcccaactgattgtaactgtcccctgttacctgtgacatgaacctccaacagcacctggaaacggttccctctgtcagctgctctgtagacagggctggggagatctcagagttcacacctcgcctgttgtaggggaggttgggggtagggtttggaatggccaagtgcccttggaacctcccacagctatggccgtcctgacctcatcccaggaactctacggtgaccaggaaccacccctctgacgaggtctgtagcggcccttctcagagtggaacagcccacagtgctagttgtgcctggtcttacctgtactccacggacctcggtgaagcaaaagcttcagggcagagggaatgaggcaacccagtggcagccccgctgggccccgtggctcctgctctcctattggacgtagaggcaggggagagacttctctatacaaatattctcatcacagaagggatgatccttgctgctctgccgtagggtttttgatgctgagctatgctgcacatgacgttaacctaaagaacttggactgagcttttaaaaaaggacagcaaacaattttataatccttaaagtgtaatagacggttacactagtgcagggtattgggggggctctttgggtgtggaggctgtcacttgtatttattgtgactctaaatctttgatagtaaaacaaatgtaaaaagaaatgtttgccaccagatgggaatagaagttccaataagcaggctggaatgggtggctatacgttgtatcacgaggaagttttagactctgaaggataataaatggatgatgtgtcaactggacttttcttttgtcccttctgccctggcttctctgtattgtttcgtcctagcttcccaggcaggttggagggagatggaggatgacccttagttaatgagagaagcaaagggcggggtgcatctgctgctggggcctcacttactgtggggatggagtccccacggcccctctcctctggagctttgtggcaaacttaccccatgggctgggagagaggaatgagaatctcagtgggggctgggtttggtggctcacatttgtaatcccagcactttgagaggctgaggtgggtggatcacctgaggtcaggagttcgataccagcctggccaacatggtgaaaccccatctctactaaaaatacaaaaattggccggatgtggtggtgggtgcctgtaccccagctacttgggaggctgaggcaggagaatcgcatgaacccgggaggcagaggttgcagtgagccaagattgcgccactgcactatagcctgggtaagagaccgtgactttctcaaaaaaaaaaaaaaattctcagtggaatttgcttgtgtttgctgcatcagccttcacgctagagtggtgggttttcctggagcaattttcaggctgggggcctcgatggtgtctttgctgcaggatgtgatattacagatgtgcaatctaagcacagagtcaccaacctggatccaaaatgaacgacgtcctggcaaaaatgttttcaagtgttgatagtttcaagttttattcttaaggtgagacctgggatcattttgctgaattttaatgtgcataaaacatgaccctgttttcctaggtgctatttatttgaggcagggtctcactctgttgcccaggctggaatgcagtggcttgatctcagctcactgcagcctcaacctccctaggctcaggtgatcctcacatctcagactcctcagtagctgggactatgggcatgcaccaccatgcccagctaattttcgtattttttgcaaagacacatttttgccatgttgcccatggctggtcttgaactcctggactcaagcagtcctctcaccttggcctcccaaagtgctgggattacaggtgtgagtcaccacgcttggccgtttcttgtctttgaagcatccttgcctccggcctgggagctcataccttccccacaactcccaagtgcctggtcttatgggcacagagctggtagagaacatggtagaaactgaacctcagcctgtccagtagcgcgatcttggctcattgcaacctccgcctcccaggttctagcgattcttctgcctcagcctcccgagtagctgggattacaggtgccgccaccagcacgcccagttaattttcagtagagatggggtttcacgtgttggccaggctggtctcaaactcctgatgtgatccaccggtctcagcctcccaaagtactgggatgacaggcgtgagccactgcacccagccacttttttttttttttttttttgagataggctctctgttgcccaagctagagtgcctagaggctctctgttgcccaggctcaggcgatcctcccacctcagcctaccgtgtagctggggccagaggcttgctacaggcatttcttgcttggcctgagaaacattcctatggggtgctgtctcctgggcttggctcttggttcctcgtgaggctctgcttccctggattgggcacaggcttgtcagtgcagttggggcagattcaaggggcgggtcctgggtcatggtctcaaatagcctctccagctgagaaaatgggacactcccctcgtccctgacatcttgtccccgacatctcatcctctctgaattgagccttgggtctgtggccacatggcaggcagagaccctgaccccatctgctcccacagattcgtcggtggacagatggcatgcactatgccctgggccccggagatgtggcaggagctatccagacagaaacatatagcaccttgagaggagggcatggggtgacattttaggcaaggcttgaagaggggaaaagtgccaggagtgtgcaaaggcttggagataggagccagcatggcaggtcaagaacaaaaagggcaatgtggtgggactgggtgggaagacggggcaagggcgtgggttttagctaagtgcagtgggagtctagggaaggtcctgggcccagtactcaagctacgcccactctgaagccatgcccactaccccaaggatggggttttgcccattttccaagtggggagtctgaggcatggccccagtcaggagcagcacccttcgaataaaccagaggggctaggggctaggttttattttatttatttattttttcttttgaggcagagtcttgctctgctgcccaggctggagtgcattggtgggatcttggctcactgcatcctccattttccgggttcaagtgattctcctgactcaggctccccagtagctaggactacaggtgcaagccacccatgcccgactaaattttgtatttttagtagagatggggttttaccatgttagccaggctggtctcaaacgcctgacctcaagtgatccgcctcccaaagtgctgggattacaggtgtgagccaccatgcccggccccaggagctgggttttctacctccactctgatgtggtccagccaagactggaggctaggcactgcccctcttttagcctcggtttcctcatctgcaaaactgaaggggacagggccatgtatctatttggagggatgaagatagagctggcactgcatcaccagggcaccagaaagccattgagactgagtgagcaggggctgggcatggggagacccaccagaggagcagctatgtagggctcatatgcaggtaggcacgattaggatttcctaatatacctaatacatttccccatataccccaaatgggaaccactcccaggctctgtggggtcctctctcaatttcctccttaccttgccatctcctttccctctctccctccttattccaggcaaataagcttactggccttactcaaacacgccagctcccctcttcctggggaacaacctggactgtttctcttaccttcagagtcccttgacttttttttttttttttttttctgagacagggtctcactctgtggtccaggctggagtgcagtggcacgatcatagctcactgcagccttgaactcccaggcccaagcgattctcccacctcaccctcccaagtaactgagacacaccaccatgcctggctaatttttaaattttttgtacagatggccgtctcgctgtgttgcccagattggtctttaactcctgggctcaagcgatccgcccacctcagcttcccaaagttctggaattataggcgtgagctgccacgccctgcccagagtccctccttgaacacctcccaactctacctggcatttagcacaacttacaattattttatttccatgtcattcttttattttacttgacttttcaattgtctcgttttcggcagggatgggcccaagtctcttcgccatgagctctggggcctggcagacagtaggtgctcaagaaatgcatgactacatgaaggaacagaggaaggaacgagctagtgagtccagctgaatctcgcccagccccgccctgactcccccaccccctcttcccgagaggaaagggacccacagcagggagggcttcccccacccccgcaacgtcactgttgctagatctgggttcaaattacagctgtgagccgggtgaagtggctcatgcctgtaactccagcactttggggaggtcgaggcaggtggatcgcctgaggtcaggagttcgagaccagcctggccaacatggtgaaaccctgtctccactaaaaatacaaaaaattagccaggcgtggttgcctgcgcctgtagtctcagctactcaggaggcagaggcatgagaattgcttgaacccgggtagagactgcagtgagccaagatcgtgccactccagcctgggcaacaaagagagaccttgtcctaaaaaaaaaaaaaaaaaaaaaaaaaaaaaatcacagctgtgtcttttttgtttgttttttgagacggagtttcgctcttgttgcccacggtggactgcagtgacacgatctcggctcactgcaacctccccctcccgggttcaagcgattcttccgcctcagcctccgagtagctgagattacaggcgcccgcccccgtgcccagctaaattttttttgtatttttagtagagacggggtttcactatattggccaggctggtctcgaactcctgacctcaggtgatccacccgccttggcctcccgaagtgctgggattacaggcgtgagcaccgcgcccggggtttttctttttctttcttttttcttttccttttttttttttttttttttttttaagaggcagggtccagggcgcgttggctcacgcctgtaatcccaacactttgagaggccgaggcgggtggatcacgaagtcaggagttcaagaccagcctggccaagatggtgaaaccccgtctctactaaaaatacaaaaattagccgggtggggggacacgcgcctgtagtcccagctacttgggaggctaaggcgggagaatcgcttgaacccgggaggcggaggttgcagtgagccgagatcgtgccactgcactccagcttgggcgacagagcgagactctgtctcaaaaaacaaacaaacaaacaaacaaacaaacaagagatgaggtctcggctgtgatgcccaggctgttttcgaactcctgacctcaagatatctgcccgcttcggactcgcagtgttggggttacaggcgtgagccaccgcgcctggcccttggctctgccttttggcaagtgacatccatgtgggcctcagtttccttatctataaactcctactttacgtggagacaggccaccctcgccccacccctggctgttccattcttaaaagatgtggacggcgaggcgctggggtccacttgcttcccagcccatcatcacagcgacatcacgacccggggacaacaaagctcctttgagtttgcccatactggggagctcaaaaggtccaggctcgaatcctcccgactcccttttgagtcttggagcaataacctcaacatgcgtgactctaaaatagggtacccgcgcctgccttccccggatggagcgatcgcttctccactagtccgcaaatgggggccaccgttagagccaggtgcgaggaacagcgagtttattgcaggttccaaccgggaacctggcacccacggctggttgggaagggacgccctccgcgcagaggctgagagttccgcgcaggcgcaatgcttccgtcccctctggtctcgccctctcggggcctggtcgcagggaatcgcggatgcgcatgcgcctccagctcccgggatcgcggggaacgtggattccgaacaagggcaactgcggactcccccgtgggaagaaagggagggaagcggaagggaaaaagcgcatgtgcagcagcacgcggcagcttcgcatattccctcgaagcgcgcctcttgcgcgtgcgccgccctggcccagtgcccttggctgcaggaatggctggaaccacccggcttctagccggagtccccggcgcgcagccagcagttgcgcgctacctggcccgcggagggcctggcggacgggctgaactgcagcagctcggcgatcagggccttgcagcgctcggacagctcgaggccttcggggtagagcacgccgcgtttctggcgccggggcaggccggcgatgtccgagtcgtcgaagggcatgcacccggtgaccatgacgtagagcacgacgcccatgctccacacatcgtacttcttggggtcgtaggggatgcccaggagcacctcgggtgacgcgtaggcggctgagccgcagtaggtggtgctcaggtctgggtagccatgggcctggcggccgaagccgaagtcggtgagcttgacgcggcgctcgtccgggctcagcagcacgttttcgcacttgaggtcgcggtgcaccaggtgatgatcgtgcaggtagcgcacggcgccggcgatctgcgcaaagaggtcgcgcgcctgaactccggggatgcgcccgttgcgctgcacggcttgcagcaggtcggtggcggccgcttccatcacgatgtacagtttcccgttgcacacctcgatgaactcgaagacgtgcacgatgtgcgggtgtcgcacgccccgcaggatggacagctctcgcggcaggaacttgttgacgaagtccgggggcgctcgccgccggtccaccaccttgatggccacggtacccttgtacttcttggatgtggccaccttcaccttggagtagctgccctctccaattgtgcggcccagcttataaccgagttcgctcagaagtttgtctcccgacatggtggcgcctagggcgcacggggggcaggaggcggctgctgtcggggggcggccggactccaatctcgggtctaagccatggcgcttggcacctacacccccgcacccccatgtgcccactgccagacattggccgctgttgtgccttttattgccccgtaacaatttttgccttgtgaagtgactgcgggcgtcactccgccttagggtgggggtccgggaccccgccccggggccaccctagcctccctgctttgtgactcataatcatcctgaatggtcagtttccgatgagaggccactagcaagggatacccatcaccaccagggagcagaatccgttccagggattggggtgagtccgacttcgagcagcagctgccccccaacatcatgtacccagcccgtgactacgtggagccctgggcttcgcgtagagtccctagacggggcgaaaacgggaaaaggggccttaactggggcacctggctcctttgagagctcggagtttctgactggcctgcgcaacaccccagaggcaaggtgaacgcgagggcctataatgcaagaaccaaggcgagtcacgccctgtctgggcaaaagaggagtaaagacccctcagctgcagcccggcagcgcattcctacccagggtccgccgccagagctttcccgcgcggtcggatagttacactactgtccgggacttcctagccgtgccgcggaccatctcaagtgcttccgccacactcatcatggcggtggcagtaagtcacttccgcccgggaccggaagtgtgggatactgcgagtatggcggcgtcaaaggtgaagcaggacatgcctccgccggggggctatgggcccatcgactacaaacggaacttgccgcgtcgaggactgtcgggtcagtatcactctgcgccggggtctcagagtctgggcactcggggctcgggggcggggttccggggacacaggcgggcctcagttttcccggcggtgtgaccggaggcggagcccggggatccatcatagcttctgtaataacgctaagtgctgcagtttgttgaggtctttcccagctcctcttccttctcgtaacagcccaggaaatcggtccctctagttatttacgttttacagtgggttaaactgagtcatagcctgtgctctggccctcagccacccttggatttctaagatggggaaactgaggcccaaagaaggccgcggctccccaaggcaaagctgaggccgcaacccggaacctggagggaatttacaagatgttctatgcagtggttccctgctggcagcccccgcctgcatggtgtcacaggaatccatattctttaaattttcaattttttttttttgagacggagttttgctcttgttgcccaggctggagtgcaatggcgccatctcggctcaccgcaacctccgcctcctgggttcaagcgattctcttgcctcagcctcctgagtagctgggattacaggcatgtgccacaacgcctggctaactttgtgtttttagtagagacggggtttctccatgttggtcagggtggtctcgaactcccaacctcggatgatccgcccacctcggcctcccaaagtgctgggattacaggcgtgagccaccatgcccggcgtaaagttttcaaatgtttaagtaacacgttaaattttgttatcgggctcagcacagaaaattgaaaaagagaacttaaaaggcgcccatactcagtccccaggttaacagacaaatagaaacttttaaacgtaatctaagagtgaatacatacatttctttttttttttttaagacggtatggttctgttgcctgggctggagtgatttcttggcaacctccgcctcctgggctcaagccatcctcccaccccagcctcctgagaagctgggattacaagcatgcgcccagctttctgtattttctatagagatgggatctcgccatcttgcccaggctggtctcgaagtcctgggctcaagtgatccacccacctcggcttcccaaagtgatgggactatcggcatgagctaccgtgctcggcagaatgcatgtctcttaacaaatcaaactttacatttaaattacatgttatgcacattattcctcaattttaacacacacacaaaaatgagcatggtaattaaaaacgtaataattcagacagtagaaaaatcagtgtgaggtgaaaagtcctccccagccccttcttggtttttttattttttatttctactttttgtagagacagggtgcagctatgttgaccaggctggtctcaaactcctgggctcaagtgatcctccagcctcagcctcccaaagtgctggaattacaggcatgagccaccgcggccaacctcctcttgtttttcttgtatcccagaactgagattggcagactttttctataaaagggacagatgacaagtattttgggtttggctggccagaaagtttcagttactgagacaaccatttacaaatggaaagtgttcttagcctgggggctctacaaaaacagattgcctgtgagccaggtggctcatgcctgtaatccccacactttgggaggctgaagcgggaggatggcttgagcccaggagtttgtgaccagcctgggcaacatagtgagacccccacctctaccaaaaattaaaaaaaaaaaaaagaggcttcaggctagatctggcccatgagtgctgtcccagaacacattggaggaatataatgcattctatttcctcatttttcttttttcttttctttctttcttttttattttttgagacagagtctcattctgtcacccaggctagagtgcagtggcccgatcttggctcactgcaacctccacctcctgggttcaagcaattctcctgtctcagcctcccgagtagctgggagtacagttggatgccaccacatccggctaatttttgtatttttagtagagatggggtttcaccatattggtcagactggtctcgaactcctgacctcaggttatccacccacctcggcctcccaaagtgctaatattgcaggcacgacccaccacgcctggcgttgtttgttttttggttgttgttttttgtgtgtgtgttttttttttttagaccaggtcttgctctgtcacccaggctggagtgcagtggcgtgatctcggctcactgcaacctgtgcctcccaggttcaagcgattctcctccctcggcctccctagtatctgggattacaggtgggcgccaccatgccctgcgatttttttttttttttttttttttttttttgagatggagttttcacttttattgcccaggctagagtgcaatggtgcaatcttggctcaccgcaacctctgcctcccaggtttaagcgattctcctgtctcagcctcccgaatagctaggattacaggcatgtgccaccatgcacagctaattttttgtatttttagtag

SEQ ID NO: 2090 - DNA, 5450 bp, Homo sapiens
ggagtcgcctccgcgggacgccacaagacctgaccggactgcgccgcccgaggccgtcggccgccgtcagcgagggcgccgagcaacttcgaatgaccgaagaagcatgccgaacacggagtcagaaacgagcgcttgaacgggacccaacagaggacgatgtggagagcaagaaaataaaaatggagagaggattgttggcttcagatttaaacactgacggagacatgagggtgacacctgagccgggagcaggtccaacccaaggattgctgagggcaacagaggccacggccatggccatgggcagaggcgaagggctggtgggcgatgggcccgtggacatgcgcacctcacacagtgacatgaagtccgagaggagacccccctcacctgacgtgattgtgctctccgacaacgagcagccctcgagcccgagagtgaatgggctgaccacggtggccttgaaggagactagcaccgaggccctcatgaaaagcagtcctgaagaacgagaaaggatgatcaagcagctgaaggaagaattgaggttagaagaagcaaaactcgtgttgttgaaaaagttgcggcagagtcaaatacaaaaggaagccaccgcccagaagcccacaggttctgttgggagcaccgtgaccacccctcccccgcttgttcggggcactcagaacattcctgctggcaagccatcactccagacctcttcagctcggatgcccggcagtgtcatacccccgcccctggtccgaggtgggcagcaggcgtcctcaaagctggggccacaggcgagctcacaggtcgtcatgcccccactcgtcaggggggctcagcaaatccacagcattaggcaacattccagcacagggccaccgcccctcctcctggccccccgggcgtcggtgcccagtgtgcagattcagggacagaggatcatccagcagggcctcatccgcgtcgccaatgttcccaacaccagcctgctcgtcaacatcccacagcccaccccagcatcactgaaggggacaacagccacctccgctcaggccaactccacccccactagtgtggcctctgtggtcacctctgccgagtctccagcaagccgacaggcggccgccaagctggcgctgcgcaaacagctggagaagacgctactcgagatccccccacccaagcccccagccccagagatgaacttcctgcccagcgccgccaacaacgagttcatctacctggtcggcctggaggaggtggtgcagaacctactggagacacaagcaggcaggatgtcggccgccactgtgctgtcccgggagccctacatgtgtgcacagtgcaagacggacttcacgtgccgctggcgggaggagaagagcggcgccatcatgtgtgagaactgcatgacaaccaaccagaagaaggcgctcaaggtggagcacaccagccggctgaaggccgcctttgtgaaggcgctgcagcaggaacaggagattgagcagcggctcctgcagcagggcacggcccctgcacaggccaaggccgagcccaccgctgccccacaccccgtgctgaagcaggtcataaaaccccggcgtaagttggcgttccgctcaggagaggcccgcgactggagtaacggggctgtgctacaggcctccagccagctgtcccggggttcggccacgacgccccgaggtgtcctgcacacgttcagtccgtcacccaaactgcagaactcagcctcggccacagccctggtcagcaggaccggcagacattctgagagaaccgtgagcgccggcaagggcagcgccacctccaactggaagaagacgcccctcagcacaggcgggacccttgcgtttgtcagcccaagcctggcggtgcacaagagctcctcggccgtggaccgccagcgagagtacctcctggacatgatcccaccccgctccatcccccagtcagccacgtggaaatagtgcgagccaggccccgtggaagacgggctccctcctcccccacctggcccctggtctagaaggacccactgcaccaccctccgctggctcgggaagacaccgtgcccgccccaagagcaagcaccggccatgctgcagaggcaagacctcaattcttggctgcaaagtttcatcagggctagggggctggtgccgcctcataggcagacgaggatcatcgctgggggacctttcccgtgggctttcttcctttctctctttgcctttagtttgcccgacaccagcagaaaagtggaccttgggggctggttctgctcctggcccccttgttcagcccctgccggcacacgggcggctcaccctggacactgtgatgcgcatgggcaaggccagcgcccggggcttctgaaccgagcggggtgtttcatttttttgcttttccctgtcttaggctcccagtctttgactgccttcccatggcgatctataagttgaaagattttttttttttttaatcacctcatgatgatggagttaaaagtaaaccgtgcagaccctggggtccctgttgtacgctgcatcatcccgctggccctgtgccctggagggtgggcggctcatggtgccacagcccctggcagggacggccggcccgcccccgtgactgactgacagatgcagggatggccgaggcagccctcgctccagctgaacgcctccattgctgcttgttctggagacccccgcccccgcaccttccagacttagcagaagaacaaactgaagaacagacccagccagagaagcagggattccagaagctgcccattaagggagaaggagaggatccggtcggcagcagccctgagcagaaagctggaggggggactgtcgcggggtttttctgttgtggtttattttattaaattttttccttttttctattcatttcgatggacgcaatcttaagccaccctggccttgctcctgggaggtgagcgtgcacaggtgtgtgcaggtcaggaggtgccgtccaggtgtgcggcgagccgctgcgcacagatgtcaggatttccgtttgggtctagtttagaacctgtccttaaacctaggggttgctgtcaggatttgctttcagactttttttttttttgtaattccctttagagtctacaaaaatgtttttaaaaggatcaggtctgcttttagtttcatttttgtttctttcccgtcccactctttaaaaactggttccgtgaggaaaggcagaagccgttccgtgtctcttgcaggctgggccggcttcatgccagtgcgagggcgtcccgtgcccacgtacatacgtatgtctccatgagttctgggctccaccagttccaattgagctccagccctggttttcctacccatgcagttagggactttaatttaattttttttttgtagggccaccgccttcaaacacaactgctacaacattctaataaaggctcatttaacccccaggctcctgtcgtgtgaatatcctcagtctgtaggaaactttttttgacacagcatagaagacctagttttggaaaacattatctaattttttgttgtgcaaatccccaaatttctcactaatttttgtttttttgtgcataacttggatgggctgaaggaggtgaggacagattggggaagggtggctttcattccaagatccagggatttggggaaaaggaaggaatttgatgttttttggggtgggaggggagggtgtgttttttacaccaaaaaaaaaaaaaaaaatcaagagtatgcaagcatttctattcctcgcatttttctgtgtgcctggcaaataaatacctgtctcctacgaccctgagctgttagccctctctgttccatgacaggggccagatcttccagctcctcccagaaggagcacccaggctggcttcttcccactgaaagccctccccagcgaaccaacctcagttctatgcagtggctggggatcaggcatccagaccgaagtcacctctgcctgctccagcttgggtcagctgggtctgaccagggggccagatccgagccgcacctgccggcccccagccccagctccagctcctgacctctcccagcctggcctggctgttcctccagggctgatggctgtcaacccatccttgtgagttcatatggactgctgcccctcgaaagggagagggtcggccccatgtccccagggagcattccatcagggacaacgtacatactgtgatgtaaactttttttttttccccccagggggcaaaagtgtgagatgccttaatctttccttcatttctgctgtctcgaacactctagcccattatttcctttcagttccttgcagcataacctctacgataagccccaagcgggttgttgtattatgacgtttatgatgttccaggtgaaggcattattaagtacctctctgggtgtggggtttggacgcaccaggatagctattgattaatgttaagggtgttctacccacagcaaagcacaccctcttaaaccaggcactgcctgggtcctggtcccgagagccctaccaggatcaggttcctgcaagccgtcagaatgtgggagcccccagcccaactgattgtaactgtcccctgttacctgtgacatgaacctccaacagcacctggaaacggttccctctgtcagctgctctgtagacagggctggggagatctcagagttcacacctcgcctgttgtaggggaggttgggggtagggtttggaatggccaagtgcccttggaacctcccacagctatggccgtcctgacctcatcccaggaactctacggtgaccaggaaccacccctctgacgaggtctgtagcggcccttctcagagtggaacagcccacagtgctagttgtgcctggtcttacctgtactccacggacctcggtgaagcaaaagcttcagggcagagggaatgaggcaacccagtggcagccccgctgggccccgtggctcctgctctcctattggacgtagaggcaggggagagacttctctatacaaatattctcatcacagaagggatgatccttgctgctctgccgtagggtttttgatgctgagctatgctgcacatgacgttaacctaaagaacttggactgagcttttaaaaaaggacagcaaacaattttataatccttaaagtgtaatagacggttacactagtgcagggtattgggggggctctttgggtgtggaggctgtcacttgtatttattgtgactctaaatctttgatagtaaaacaaatgtaaaaagaaatgtttgccaccagatgggaatagaagttccaataagcaggctggaatgggtggctatacgttgtatcacgaggaagttttagactctgaaggataataaatggatgatgtgtcaa

SEQ ID NO: 2091 - protein, 628 aa, Homo sapiens
MTEEACRTRSQKRALERDPTEDDVESKKIKMERGLLASDLNTDGDMRVTPEPGAGPTQGLLRATEATAMAMGRGEGLVGDGPVDMRTSHSDMKSRPPSPDVIVLSDNEQPSSPRVNGLTTVKETSTEALMKSSPEERERMIKQLKEELRLEEAKLVLLKKLRQSQIQKEATAQKPTGSVGSTVTTPPPLVRGTQNIPAGKPSLQTSSARMPGSVIPPPLVRGGQQASSKLGPQASSQVVMPPLVRGAQQIHSIRQHSSTGPPPLLLAPRASVPSVQIQGQRIIQQGLIRVANVPNTSLLVNIPQPTPASLKGTTATSAQANSTPTSVASVVTSAESPASRQAAAKLALRKQLEKTLLEIPPPKPPAPEMNFLPSAANNEFIYLVGLEEVVQNLLETQAGRMSAATVLSREPYMCAQCKTDFTCRWREEKSGAIMCENCMTTNQKKALKVEHTSRLKAAFVKALQQEQEIEQRLLQQGTAPAQAKAEPTAAPHPVLKQVIKPRRKLAFRSGEARDWSNGAVLQASSQLSRGSATTPRGVLHTFSPSPKLQNSASATALVSRTGRHSTVSAGKGSATSNWKKTPLSTGGTLAFVSPSLAVHKSSSAVDRQREYLLDMIPPRSIPQSATWK

SEQ ID NO: 2092 - DNA, 5375 bp, Homo sapiens
ggagtcgcctccgcgggacgccacaagacctgaccggactgcgccgcccgaggccgtcggccgccgtcagcgagggcgccgagcaacttcgaatgaccgaagaagcatgccgaacacggagtcagaaacgagcgcttgaacgggacccaacagaggacgatgtggagagcaagaaaataaaaatggagagaggattgttggcttcagatttaaacactgacggagacatgagggtgacacctgagccgggagcaggtccaacccaaggattgctgagggcaacagaggccacggccatggccatgggcagaggcgaagggctggtgggcgatgggcccgtggacatgcgcacctcacacagtgacatgaagtccgagaggagacccccctcacctgacgtgattgtgctctccgacaacgagcagccctcgagcccgagagtgaatgggctgaccacggtggccttgaaggagactagcaccgaggccctcatgaaaagcagtcctgaagaacgagaaaggatgatcaagcagctgaaggaagaattgaggttagaagaagcaaaactcgtgttgttgaaaaagttgcggcagagtcaaatacaaaaggaagccaccgcccagaagcccacaggttctgttgggagcaccgtgaccacccctcccccgcttgttcggggcactcagaacattcctgctggcaagccatcactccagacctcttcagctcggatgcccggcagtgtcatacccccgcccctggtccgaggtgggcagcaggcgtcctcaaagctggggccacaggcgagctcacaggtcgtcatgcccccactcgtcaggggggctcagcaaatccacagcattaggcaacattccagcacagggccaccgcccctcctcctggccccccgggcgtcggtgcccagtgtgcagattcagggacagaggatcatccagcagggcctcatccgcgtcgccaatgttcccaacaccagcctgctcgtcaacatcccacagcccaccccagcatcactgaaggggacaacagccacctccgctcaggccaactccacccccactagtgtggcctctgtggtcacctctgccgagtctccagcaagccgacaggcggccgccaagctggcgctgcgcaaacagctggagaagacgctactcgagatccccccacccaagcccccagccccagagatgaacttcctgcccagcgccgccaacaacgagttcatctacctggtcggcctggaggaggtggtgcagaacctactggagacacaagcaggcaggatgtcggccgccactgtgctgtcccgggagccctacatgtgtgcacagtgcaagacggacttcacgtgccgctggcgggaggagaagagcggcgccatcatgtgtgagaactgcatgacaaccaaccagaagaaggcgctcaaggtggagcacaccagccggctgaaggccgcctttgtgaaggcgctgcagcaggaacaggagattgagcagcggctcctgcagcagggcacggcccctgcacaggccaaggccgagcccaccgctgccccacaccccgtgctgaagcaggcctccagccagctgtcccggggttcggccacgacgccccgaggtgtcctgcacacgttcagtccgtcacccaaactgcagaactcagcctcggccacagccctggtcagcaggaccggcagacattctgagagaaccgtgagcgccggcaagggcagcgccacctccaactggaagaagacgcccctcagcacaggcgggacccttgcgtttgtcagcccaagcctggcggtgcacaagagctcctcggccgtggaccgccagcgagagtacctcctggacatgatcccaccccgctccatcccccagtcagccacgtggaaatagtgcgagccaggccccgtggaagacgggctccctcctcccccacctggcccctggtctagaaggacccactgcaccaccctccgctggctcgggaagacaccgtgcccgccccaagagcaagcaccggccatgctgcagaggcaagacctcaattcttggctgcaaagtttcatcagggctagggggctggtgccgcctcataggcagacgaggatcatcgctgggggacctttcccgtgggctttcttcctttctctctttgcctttagtttgcccgacaccagcagaaaagtggaccttgggggctggttctgctcctggcccccttgttcagcccctgccggcacacgggcggctcaccctggacactgtgatgcgcatgggcaaggccagcgcccggggcttctgaaccgagcggggtgtttcatttttttgcttttccctgtcttaggctcccagtctttgactgccttcccatggcgatctataagttgaaagattttttttttttttaatcacctcatgatgatggagttaaaagtaaaccgtgcagaccctggggtccctgttgtacgctgcatcatcccgctggccctgtgccctggagggtgggcggctcatggtgccacagcccctggcagggacggccggcccgcccccgtgactgactgacagatgcagggatggccgaggcagccctcgctccagctgaacgcctccattgctgcttgttctggagacccccgcccccgcaccttccagacttagcagaagaacaaactgaagaacagacccagccagagaagcagggattccagaagctgcccattaagggagaaggagaggatccggtcggcagcagccctgagcagaaagctggaggggggactgtcgcggggtttttctgttgtggtttattttattaaattttttccttttttctattcatttcgatggacgcaatcttaagccaccctggccttgctcctgggaggtgagcgtgcacaggtgtgtgcaggtcaggaggtgccgtccaggtgtgcggcgagccgctgcgcacagatgtcaggatttccgtttgggtctagtttagaacctgtccttaaacctaggggttgctgtcaggatttgctttcagactttttttttttttgtaattccctttagagtctacaaaaatgtttttaaaaggatcaggtctgcttttagtttcatttttgtttctttcccgtcccactctttaaaaactggttccgtgaggaaaggcagaagccgttccgtgtctcttgcaggctgggccggcttcatgccagtgcgagggcgtcccgtgcccacgtacatacgtatgtctccatgagttctgggctccaccagttccaattgagctccagccctggttttcctacccatgcagttagggactttaatttaattttttttttgtagggccaccgccttcaaacacaactgctacaacattctaataaaggctcatttaacccccaggctcctgtcgtgtgaatatcctcagtctgtaggaaactttttttgacacagcatagaagacctagttttggaaaacattatctaattttttgttgtgcaaatccccaaatttctcactaatttttgtttttttgtgcataacttggatgggctgaaggaggtgaggacagattggggaagggtggctttcattccaagatccagggatttggggaaaaggaaggaatttgatgttttttggggtgggaggggagggtgtgttttttacaccaaaaaaaaaaaaaaaaatcaagagtatgcaagcatttctattcctcgcatttttctgtgtgcctggcaaataaatacctgtctcctacgaccctgagctgttagccctctctgttccatgacaggggccagatcttccagctcctcccagaaggagcacccaggctggcttcttcccactgaaagccctccccagcgaaccaacctcagttctatgcagtggctggggatcaggcatccagaccgaagtcacctctgcctgctccagcttgggtcagctgggtctgaccagggggccagatccgagccgcacctgccggcccccagccccagctccagctcctgacctctcccagcctggcctggctgttcctccagggctgatggctgtcaacccatccttgtgagttcatatggactgctgcccctcgaaagggagagggtcggccccatgtccccagggagcattccatcagggacaacgtacatactgtgatgtaaactttttttttttccccccagggggcaaaagtgtgagatgccttaatctttccttcatttctgctgtctcgaacactctagcccattatttcctttcagttccttgcagcataacctctacgataagccccaagcgggttgttgtattatgacgtttatgatgttccaggtgaaggcattattaagtacctctctgggtgtggggtttggacgcaccaggatagctattgattaatgttaagggtgttctacccacagcaaagcacaccctcttaaaccaggcactgcctgggtcctggtcccgagagccctaccaggatcaggttcctgcaagccgtcagaatgtgggagcccccagcccaactgattgtaactgtcccctgttacctgtgacatgaacctccaacagcacctggaaacggttccctctgtcagctgctctgtagacagggctggggagatctcagagttcacacctcgcctgttgtaggggaggttgggggtagggtttggaatggccaagtgcccttggaacctcccacagctatggccgtcctgacctcatcccaggaactctacggtgaccaggaaccacccctctgacgaggtctgtagcggcccttctcagagtggaacagcccacagtgctagttgtgcctggtcttacctgtactccacggacctcggtgaagcaaaagcttcagggcagagggaatgaggcaacccagtggcagccccgctgggccccgtggctcctgctctcctattggacgtagaggcaggggagagacttctctatacaaatattctcatcacagaagggatgatccttgctgctctgccgtagggtttttgatgctgagctatgctgcacatgacgttaacctaaagaacttggactgagcttttaaaaaaggacagcaaacaattttataatccttaaagtgtaatagacggttacactagtgcagggtattgggggggctctttgggtgtggaggctgtcacttgtatttattgtgactctaaatctttgatagtaaaacaaatgtaaaaagaaatgtttgccaccagatgggaatagaagttccaataagcaggctggaatgggtggctatacgttgtatcacgaggaagttttagactctgaaggataataaatggatgatgtgtcaa

SEQ ID NO: 2093 - protein, 603 aa, Homo sapiens
MTEEACRTRSQKRALERDPTEDDVESKKIKMERGLLASDLNTDGDMRVTPEPGAGPTQGLLRATEATAMAMGRGEGLVGDGPVDMRTSHSDMKSRPPSPDVIVLSDNEQPSSPRVNGLTTVKETSTEALMKSSPEERERMIKQLKEELRLEEAKLVLLKKLRQSQIQKEATAQKPTGSVGSTVTTPPPLVRGTQNIPAGKPSLQTSSARMPGSVIPPPLVRGGQQASSKLGPQASSQVVMPPLVRGAQQIHSIRQHSSTGPPPLLLAPRASVPSVQIQGQRIIQQGLIRVANVPNTSLLVNIPQPTPASLKGTTATSAQANSTPTSVASVVTSAESPASRQAAAKLALRKQLEKTLLEIPPPKPPAPEMNFLPSAANNEFIYLVGLEEVVQNLLETQAGRMSAATVLSREPYMCAQCKTDFTCRWREEKSGAIMCENCMTTNQKKALKVEHTSRLKAAFVKALQQEQEIEQRLLQQGTAPAQAKAEPTAAPHPVLKQASSQLSRGSATTPRGVLHTFSPSPKLQNSASATALVSRTGRHSTVSAGKGSATSNWKKTPLSTGGTLAFVSPSLAVHKSSSAVDRQREYLLDMIPPRSIPQSATWK

SEQ ID NO: 2094 - DNA, 5395 bp, Homo sapiens
ggagtcgcctccgcgggacgccacaagacctgaccggactgcgccgcccgaggccgtcggccgccgtcagcgagggcgccgagcaacttcgaatgaccgaagaagcatgccgaacacggagtcagaaacgagcgcttgaacgggacccaacagaggacgatgtggagagcaagaaaataaaaatggagagaggattgttggcttcagatttaaacactgacggagacatgagggtgacacctgagccgggagcaggtccaacccaaggattgctgagggcaacagaggccacggccatggccatgggcagaggcgaagggctggtgggcgatgggcccgtggacatgcgcacctcacacagtgacatgaagtccgagaggagacccccctcacctgacgtgattgtgctctccgacaacgagcagccctcgagcccgagagtgaatgggctgaccacggtggccttgaaggagactagcaccgaggccctcatgaaaagcagtcctgaagaacgagaaaggatgatcaagcagctgaaggaagaattgaggttagaagaagcaaaactcgtgttgttgaaaaagttgcggcagagtcaaatacaaaaggaagccaccgcccagaagcccacaggttctgttgggagcaccgtgaccacccctcccccgcttgttcggggcactcagaacattcctgctggcaagccatcactccagacctcttcagctcggatgcccggcagtgtcatacccccgcccctggtccgaggtgggcagcaggcgtcctcaaagctggggccacaggcgagctcacaggtcgtcatgcccccactcgtcaggggggctcagcaaatccacagcattaggcaacattccagcacagggccaccgcccctcctcctggccccccgggcgtcggtgcccagtgtgcagattcagggacagaggatcatccagcagggcctcatccgcgtcgccaatgttcccaacaccagcctgctcgtcaacatcccacagcccaccccagcatcactgaaggggacaacagccacctccgctcaggccaactccacccccactagtgtggcctctgtggtcacctctgccgagtctccagcaagccgacaggcggccgccaagctggcgctgcgcaaacagctggagaagacgctactcgagatccccccacccaagcccccagccccagagatgaacttcctgcccagcgccgccaacaacgagttcatctacctggtcggcctggaggaggtggtgcagaacctactggagacacaagcaggcaggatgtcggccgccactgtgctgtcccgggagccctacatgtgtgcacagtgcaagacggacttcacgtgccgctggcgggaggagaagagcggcgccatcatgtgtgagaactgcatgacaaccaaccagaagaaggcgctcaaggtggagcacaccagccggctgaaggccgcctttgtgaaggcgctgcagcaggaacaggagattgagcagcggctcctgcagcagggcacggcccctgcacaggccaaggccgagcccaccgctgccccacaccccgtgctgaagcaggtcataaaaccccggcgtaagttggcgttccgctcaggagaggcccgcgactggagtaacggggctgtgctacaggcctccagccagctgtcccggggttcggccacgacgccccgaggtgtcctgcacacgttcagtccgtcacccaaactgcagaactcagcctcggccacagccctggtcagcaggaccggcagacattctgagagaaccgtgagcgccggcaagggcagcgccacctccaactggaagaagacgcccctcagcacaggcgggacccttgcgtttgtcagcccaagcctggcggtgcacaagagctcctcggccgtggaccgccagcgagagtacctcctggacatgatcccaccccgctccatcccccagtcagccacgtggaaatagtgcgagccaggccccgtggaagacgggctccctcctcccccacctggcccctggtctagaaggacccactgcaccaccctccgctggctcgggaagacaccgtgcccgccccaagagcaagcaccggccatgctgcagaggcaagacctcaattcttggctgcaaagtttcatcagggctagggggctggtgccgcctcataggcagacgaggatcatcgctgggggacctttcccgtgggctttcttcctttctctctttgcctttagtttgcccgacaccagcagaaaagtggaccttgggggctggttctgctcctggcccccttgttcagcccctgccggcacacgggcggctcaccctggacactgtgatgcgcatgggcaaggccagcgcccggggcttctgaaccgagcggggtgtttcatttttttgcttttccctgtcttaggctcccagtctttgactgccttcccatggcgatctataagttgaaagattttttttttttttaatcacctcatgatgatggactggccctgtgccctggagggtgggcggctcatggtgccacagcccctggcagggacggccggcccgcccccgtgactgactgacagatgcagggatggccgaggcagccctcgctccagctgaacgcctccattgctgcttgttctggagacccccgcccccgcaccttccagacttagcagaagaacaaactgaagaacagacccagccagagaagcagggattccagaagctgcccattaagggagaaggagaggatccggtcggcagcagccctgagcagaaagctggaggggggactgtcgcggggtttttctgttgtggtttattttattaaattttttccttttttctattcatttcgatggacgcaatcttaagccaccctggccttgctcctgggaggtgagcgtgcacaggtgtgtgcaggtcaggaggtgccgtccaggtgtgcggcgagccgctgcgcacagatgtcaggatttccgtttgggtctagtttagaacctgtccttaaacctaggggttgctgtcaggatttgctttcagactttttttttttttgtaattccctttagagtctacaaaaatgtttttaaaaggatcaggtctgcttttagtttcatttttgtttctttcccgtcccactctttaaaaactggttccgtgaggaaaggcagaagccgttccgtgtctcttgcaggctgggccggcttcatgccagtgcgagggcgtcccgtgcccacgtacatacgtatgtctccatgagttctgggctccaccagttccaattgagctccagccctggttttcctacccatgcagttagggactttaatttaattttttttttgtagggccaccgccttcaaacacaactgctacaacattctaataaaggctcatttaacccccaggctcctgtcgtgtgaatatcctcagtctgtaggaaactttttttgacacagcatagaagacctagttttggaaaacattatctaattttttgttgtgcaaatccccaaatttctcactaatttttgtttttttgtgcataacttggatgggctgaaggaggtgaggacagattggggaagggtggctttcattccaagatccagggatttggggaaaaggaaggaatttgatgttttttggggtgggaggggagggtgtgttttttacaccaaaaaaaaaaaaaaaaatcaagagtatgcaagcatttctattcctcgcatttttctgtgtgcctggcaaataaatacctgtctcctacgaccctgagctgttagccctctctgttccatgacaggggccagatcttccagctcctcccagaaggagcacccaggctggcttcttcccactgaaagccctccccagcgaaccaacctcagttctatgcagtggctggggatcaggcatccagaccgaagtcacctctgcctgctccagcttgggtcagctgggtctgaccagggggccagatccgagccgcacctgccggcccccagccccagctccagctcctgacctctcccagcctggcctggctgttcctccagggctgatggctgtcaacccatccttgtgagttcatatggactgctgcccctcgaaagggagagggtcggccccatgtccccagggagcattccatcagggacaacgtacatactgtgatgtaaactttttttttttccccccagggggcaaaagtgtgagatgccttaatctttccttcatttctgctgtctcgaacactctagcccattatttcctttcagttccttgcagcataacctctacgataagccccaagcgggttgttgtattatgacgtttatgatgttccaggtgaaggcattattaagtacctctctgggtgtggggtttggacgcaccaggatagctattgattaatgttaagggtgttctacccacagcaaagcacaccctcttaaaccaggcactgcctgggtcctggtcccgagagccctaccaggatcaggttcctgcaagccgtcagaatgtgggagcccccagcccaactgattgtaactgtcccctgttacctgtgacatgaacctccaacagcacctggaaacggttccctctgtcagctgctctgtagacagggctggggagatctcagagttcacacctcgcctgttgtaggggaggttgggggtagggtttggaatggccaagtgcccttggaacctcccacagctatggccgtcctgacctcatcccaggaactctacggtgaccaggaaccacccctctgacgaggtctgtagcggcccttctcagagtggaacagcccacagtgctagttgtgcctggtcttacctgtactccacggacctcggtgaagcaaaagcttcagggcagagggaatgaggcaacccagtggcagccccgctgggccccgtggctcctgctctcctattggacgtagaggcaggggagagacttctctatacaaatattctcatcacagaagggatgatccttgctgctctgccgtagggtttttgatgctgagctatgctgcacatgacgttaacctaaagaacttggactgagcttttaaaaaaggacagcaaacaattttataatccttaaagtgtaatagacggttacactagtgcagggtattgggggggctctttgggtgtggaggctgtcacttgtatttattgtgactctaaatctttgatagtaaaacaaatgtaaaaagaaatgtttgccaccagatgggaatagaagttccaataagcaggctggaatgggtggctatacgttgtatcacgaggaagttttagactctgaaggataataaatggatgatgtgtcaa

SEQ ID NO: 2095 - protein, 628 aa, Homo sapiens; identical to SEQ ID NO: 2091

SEQ ID NO: 2096 - DNA, 5392 bp, Homo sapiens
ggagtcgcctccgcgggacgccacaagacctgaccggactgcgccgcccgaggccgtcggccgccgtcagcgagggcgccgagcaacttcgaatgaccgaagaagcatgccgaacacggagtcagaaacgagcgcttgaacgggacccaacagaggacgatgtggagagcaagaaaataaaaatggagagaggattgttggcttcagatttaaacactgacggagacatgagggtgacacctgagccgggagcaggtccaacccaaggattgctgagggcaacagaggccacggccatggccatgggcagaggcgaagggctggtgggcgatgggcccgtggacatgcgcacctcacacagtgacatgaagtccgagaggagacccccctcacctgacgtgattgtgctctccgacaacgagcagccctcgagcccgagagtgaatgggctgaccacggtggccttgaaggagactagcaccgaggccctcatgaaaagcagtcctgaagaacgagaaaggatgatcaagcagctgaaggaagaattgaggttagaagaagcaaaactcgtgttgttgaaaaagttgcggcagagtcaaatacaaaaggaagccaccgcccagaagcccacaggttctgttgggagcaccgtgaccacccctcccccgcttgttcggggcactcagaacattcctgctggcaagccatcactccagacctcttcagctcggatgcccggcagtgtcatacccccgcccctggtccgaggtgggcagcaggcgtcctcaaagctggggccacaggcgagctcacaggtcgtcatgcccccactcgtcaggggggctcagcaaatccacagcattaggcaacattccagcacagggccaccgcccctcctcctggccccccgggcgtcggtgcccagtgtgcagattcagggacagaggatcatccagcagggcctcatccgcgtcgccaatgttcccaacaccagcctgctcgtcaacatcccacagcccaccccagcatcactgaaggggacaacagccacctccgctcaggccaactccacccccactagtgtggcctctgtggtcacctctgccgagtctccagcaagccgacaggcggccgccaagctggcgctgcgcaaacagctggagaagacgctactcgagatccccccacccaagcccccagccccagagatgaacttcctgcccagcgccgccaacaacgagttcatctacctggtcggcctggaggaggtggtgcagaacctactggagacacaaggcaggatgtcggccgccactgtgctgtcccgggagccctacatgtgtgcacagtgcaagacggacttcacgtgccgctggcgggaggagaagagcggcgccatcatgtgtgagaactgcatgacaaccaaccagaagaaggcgctcaaggtggagcacaccagccggctgaaggccgcctttgtgaaggcgctgcagcaggaacaggagattgagcagcggctcctgcagcagggcacggcccctgcacaggccaaggccgagcccaccgctgccccacaccccgtgctgaagcaggtcataaaaccccggcgtaagttggcgttccgctcaggagaggcccgcgactggagtaacggggctgtgctacaggcctccagccagctgtcccggggttcggccacgacgccccgaggtgtcctgcacacgttcagtccgtcacccaaactgcagaactcagcctcggccacagccctggtcagcaggaccggcagacattctgagagaaccgtgagcgccggcaagggcagcgccacctccaactggaagaagacgcccctcagcacaggcgggacccttgcgtttgtcagcccaagcctggcggtgcacaagagctcctcggccgtggaccgccagcgagagtacctcctggacatgatcccaccccgctccatcccccagtcagccacgtggaaatagtgcgagccaggccccgtggaagacgggctccctcctcccccacctggcccctggtctagaaggacccactgcaccaccctccgctggctcgggaagacaccgtgcccgccccaagagcaagcaccggccatgctgcagaggcaagacctcaattcttggctgcaaagtttcatcagggctagggggctggtgccgcctcataggcagacgaggatcatcgctgggggacctttcccgtgggctttcttcctttctctctttgcctttagtttgcccgacaccagcagaaaagtggaccttgggggctggttctgctcctggcccccttgttcagcccctgccggcacacgggcggctcaccctggacactgtgatgcgcatgggcaaggccagcgcccggggcttctgaaccgagcggggtgtttcatttttttgcttttccctgtcttaggctcccagtctttgactgccttcccatggcgatctataagttgaaagattttttttttttttaatcacctcatgatgatggactggccctgtgccctggagggtgggcggctcatggtgccacagcccctggcagggacggccggcccgcccccgtgactgactgacagatgcagggatggccgaggcagccctcgctccagctgaacgcctccattgctgcttgttctggagacccccgcccccgcaccttccagacttagcagaagaacaaactgaagaacagacccagccagagaagcagggattccagaagctgcccattaagggagaaggagaggatccggtcggcagcagccctgagcagaaagctggaggggggactgtcgcggggtttttctgttgtggtttattttattaaattttttccttttttctattcatttcgatggacgcaatcttaagccaccctggccttgctcctgggaggtgagcgtgcacaggtgtgtgcaggtcaggaggtgccgtccaggtgtgcggcgagccgctgcgcacagatgtcaggatttccgtttgggtctagtttagaacctgtccttaaacctaggggttgctgtcaggatttgctttcagactttttttttttttgtaattccctttagagtctacaaaaatgtttttaaaaggatcaggtctgcttttagtttcatttttgtttctttcccgtcccactctttaaaaactggttccgtgaggaaaggcagaagccgttccgtgtctcttgcaggctgggccggcttcatgccagtgcgagggcgtcccgtgcccacgtacatacgtatgtctccatgagttctgggctccaccagttccaattgagctccagccctggttttcctacccatgcagttagggactttaatttaattttttttttgtagggccaccgccttcaaacacaactgctacaacattctaataaaggctcatttaacccccaggctcctgtcgtgtgaatatcctcagtctgtaggaaactttttttgacacagcatagaagacctagttttggaaaacattatctaattttttgttgtgcaaatccccaaatttctcactaatttttgtttttttgtgcataacttggatgggctgaaggaggtgaggacagattggggaagggtggctttcattccaagatccagggatttggggaaaaggaaggaatttgatgttttttggggtgggaggggagggtgtgttttttacaccaaaaaaaaaaaaaaaaatcaagagtatgcaagcatttctattcctcgcatttttctgtgtgcctggcaaataaatacctgtctcctacgaccctgagctgttagccctctctgttccatgacaggggccagatcttccagctcctcccagaaggagcacccaggctggcttcttcccactgaaagccctccccagcgaaccaacctcagttctatgcagtggctggggatcaggcatccagaccgaagtcacctctgcctgctccagcttgggtcagctgggtctgaccagggggccagatccgagccgcacctgccggcccccagccccagctccagctcctgacctctcccagcctggcctggctgttcctccagggctgatggctgtcaacccatccttgtgagttcatatggactgctgcccctcgaaagggagagggtcggccccatgtccccagggagcattccatcagggacaacgtacatactgtgatgtaaactttttttttttccccccagggggcaaaagtgtgagatgccttaatctttccttcatttctgctgtctcgaacactctagcccattatttcctttcagttccttgcagcataacctctacgataagccccaagcgggttgttgtattatgacgtttatgatgttccaggtgaaggcattattaagtacctctctgggtgtggggtttggacgcaccaggatagctattgattaatgttaagggtgttctacccacagcaaagcacaccctcttaaaccaggcactgcctgggtcctggtcccgagagccctaccaggatcaggttcctgcaagccgtcagaatgtgggagcccccagcccaactgattgtaactgtcccctgttacctgtgacatgaacctccaacagcacctggaaacggttccctctgtcagctgctctgtagacagggctggggagatctcagagttcacacctcgcctgttgtaggggaggttgggggtagggtttggaatggccaagtgcccttggaacctcccacagctatggccgtcctgacctcatcccaggaactctacggtgaccaggaaccacccctctgacgaggtctgtagcggcccttctcagagtggaacagcccacagtgctagttgtgcctggtcttacctgtactccacggacctcggtgaagcaaaagcttcagggcagagggaatgaggcaacccagtggcagccccgctgggccccgtggctcctgctctcctattggacgtagaggcaggggagagacttctctatacaaatattctcatcacagaagggatgatccttgctgctctgccgtagggtttttgatgctgagctatgctgcacatgacgttaacctaaagaacttggactgagcttttaaaaaaggacagcaaacaattttataatccttaaagtgtaatagacggttacactagtgcagggtattgggggggctctttgggtgtggaggctgtcacttgtatttattgtgactctaaatctttgatagtaaaacaaatgtaaaaagaaatgtttgccaccagatgggaatagaagttccaataagcaggctggaatgggtggctatacgttgtatcacgaggaagttttagactctgaaggataataaatggatgatgtgtcaa

SEQ ID NO: 2097 - protein, 627 aa, Homo sapiens
MTEEACRTRSQKRALERDPTEDDVESKKIKMERGLLASDLNTDGDMRVTPEPGAGPTQGLLRATEATAMAMGRGEGLVGDGPVDMRTSHSDMKSRPPSPDVIVLSDNEQPSSPRVNGLTTVKETSTEALMKSSPEERERMIKQLKEELRLEEAKLVLLKKLRQSQIQKEATAQKPTGSVGSTVTTPPPLVRGTQNIPAGKPSLQTSSARMPGSVIPPPLVRGGQQASSKLGPQASSQVVMPPLVRGAQQIHSIRQHSSTGPPPLLLAPRASVPSVQIQGQRIIQQGLIRVANVPNTSLLVNIPQPTPASLKGTTATSAQANSTPTSVASVVTSAESPASRQAAAKLALRKQLEKTLLEIPPPKPPAPEMNFLPSAANNEFIYLVGLEEVVQNLLETQGRMSAATVLSREPYMCAQCKTDFTCRWREEKSGAIMCENCMTTNQKKALKVEHTSRLKAAFVKALQQEQEIEQRLLQQGTAPAQAKAEPTAAPHPVLKQVIKPRRKLAFRSGEARDWSNGAVLQASSQLSRGSATTPRGVLHTFSPSPKLQNSASATALVSRTGRHSTVSAGKGSATSNWKKTPLSTGGTLAFVSPSLAVHKSSSAVDRQREYLLDMIPPRSIPQSATWK

SEQ ID NO: 2098 - DNA, 5392 bp, Homo sapiens
gcacggagattgttgccagggctctggtgagttcagaatgaccgaagaagcatgccgaacacggagtcagaaacgagcgcttgaacgggacccaacagaggacgatgtggagagcaagaaaataaaaatggagagaggattgttggcttcagatttaaacactgacggagacatgagggtgacacctgagccgggagcaggtccaacccaaggattgctgagggcaacagaggccacggccatggccatgggcagaggcgaagggctggtgggcgatgggcccgtggacatgcgcacctcacacagtgacatgaagtccgagaggagacccccctcacctgacgtgattgtgctctccgacaacgagcagccctcgagcccgagagtgaatgggctgaccacggtggccttgaaggagactagcaccgaggccctcatgaaaagcagtcctgaagaacgagaaaggatgatcaagcagctgaaggaagaattgaggttagaagaagcaaaactcgtgttgttgaaaaagttgcggcagagtcaaatacaaaaggaagccaccgcccagaagcccacaggttctgttgggagcaccgtgaccacccctcccccgcttgttcggggcactcagaacattcctgctggcaagccatcactccagacctcttcagctcggatgcccggcagtgtcatacccccgcccctggtccgaggtgggcagcaggcgtcctcaaagctggggccacaggcgagctcacaggtcgtcatgcccccactcgtcaggggggctcagcaaatccacagcattaggcaacattccagcacagggccaccgcccctcctcctggccccccgggcgtcggtgcccagtgtgcagattcagggacagaggatcatccagcagggcctcatccgcgtcgccaatgttcccaacaccagcctgctcgtcaacatcccacagcccaccccagcatcactgaaggggacaacagccacctccgctcaggccaactccacccccactagtgtggcctctgtggtcacctctgccgagtctccagcaagccgacaggcggccgccaagctggcgctgcgcaaacagctggagaagacgctactcgagatccccccacccaagcccccagccccagagatgaacttcctgcccagcgccgccaacaacgagttcatctacctggtcggcctggaggaggtggtgcagaacctactggagacacaaggcaggatgtcggccgccactgtgctgtcccgggagccctacatgtgtgcacagtgcaagacggacttcacgtgccgctggcgggaggagaagagcggcgccatcatgtgtgagaactgcatgacaaccaaccagaagaaggcgctcaaggtggagcacaccagccggctgaaggccgcctttgtgaaggcgctgcagcaggaacaggagattgagcagcggctcctgcagcagggcacggcccctgcacaggccaaggccgagcccaccgctgccccacaccccgtgctgaagcaggtcataaaaccccggcgtaagttggcgttccgctcaggagaggcccgcgactggagtaacggggctgtgctacaggcctccagccagctgtcccggggttcggccacgacgccccgaggtgtcctgcacacgttcagtccgtcacccaaactgcagaactcagcctcggccacagccctggtcagcaggaccggcagacattctgagagaaccgtgagcgccggcaagggcagcgccacctccaactggaagaagacgcccctcagcacaggcgggacccttgcgtttgtcagcccaagcctggcggtgcacaagagctcctcggccgtggaccgccagcgagagtacctcctggacatgatcccaccccgctccatcccccagtcagccacgtggaaatagtgcgagccaggccccgtggaagacgggctccctcctcccccacctggcccctggtctagaaggacccactgcaccaccctccgctggctcgggaagacaccgtgcccgccccaagagcaagcaccggccatgctgcagaggcaagacctcaattcttggctgcaaagtttcatcagggctagggggctggtgccgcctcataggcagacgaggatcatcgctgggggacctttcccgtgggctttcttcctttctctctttgcctttagtttgcccgacaccagcagaaaagtggaccttgggggctggttctgctcctggcccccttgttcagcccctgccggcacacgggcggctcaccctggacactgtgatgcgcatgggcaaggccagcgcccggggcttctgaaccgagcggggtgtttcatttttttgcttttccctgtcttaggctcccagtctttgactgccttcccatggcgatctataagttgaaagattttttttttttttaatcacctcatgatgatggagttaaaagtaaaccgtgcagaccctggggtccctgttgtacgctgcatcatcccgctggccctgtgccctggagggtgggcggctcatggtgccacagcccctggcagggacggccggcccgcccccgtgactgactgacagatgcagggatggccgaggcagccctcgctccagctgaacgcctccattgctgcttgttctggagacccccgcccccgcaccttccagacttagcagaagaacaaactgaagaacagacccagccagagaagcagggattccagaagctgcccattaagggagaaggagaggatccggtcggcagcagccctgagcagaaagctggaggggggactgtcgcggggtttttctgttgtggtttattttattaaattttttccttttttctattcatttcgatggacgcaatcttaagccaccctggccttgctcctgggaggtgagcgtgcacaggtgtgtgcaggtcaggaggtgccgtccaggtgtgcggcgagccgctgcgcacagatgtcaggatttccgtttgggtctagtttagaacctgtccttaaacctaggggttgctgtcaggatttgctttcagactttttttttttttgtaattccctttagagtctacaaaaatgtttttaaaaggatcaggtctgcttttagtttcatttttgtttctttcccgtcccactctttaaaaactggttccgtgaggaaaggcagaagccgttccgtgtctcttgcaggctgggccggcttcatgccagtgcgagggcgtcccgtgcccacgtacatacgtatgtctccatgagttctgggctccaccagttccaattgagctccagccctggttttcctacccatgcagttagggactttaatttaattttttttttgtagggccaccgccttcaaacacaactgctacaacattctaataaaggctcatttaacccccaggctcctgtcgtgtgaatatcctcagtctgtaggaaactttttttgacacagcatagaagacctagttttggaaaacattatctaattttttgttgtgcaaatccccaaatttctcactaatttttgtttttttgtgcataacttggatgggctgaaggaggtgaggacagattggggaagggtggctttcattccaagatccagggatttggggaaaaggaaggaatttgatgttttttggggtgggaggggagggtgtgttttttacaccaaaaaaaaaaaaaaaaatcaagagtatgcaagcatttctattcctcgcatttttctgtgtgcctggcaaataaatacctgtctcctacgaccctgagctgttagccctctctgttccatgacaggggccagatcttccagctcctcccagaaggagcacccaggctggcttcttcccactgaaagccctccccagcgaaccaacctcagttctatgcagtggctggggatcaggcatccagaccgaagtcacctctgcctgctccagcttgggtcagctgggtctgaccagggggccagatccgagccgcacctgccggcccccagccccagctccagctcctgacctctcccagcctggcctggctgttcctccagggctgatggctgtcaacccatccttgtgagttcatatggactgctgcccctcgaaagggagagggtcggccccatgtccccagggagcattccatcagggacaacgtacatactgtgatgtaaactttttttttttccccccagggggcaaaagtgtgagatgccttaatctttccttcatttctgctgtctcgaacactctagcccattatttcctttcagttccttgcagcataacctctacgataagccccaagcgggttgttgtattatgacgtttatgatgttccaggtgaaggcattattaagtacctctctgggtgtggggtttggacgcaccaggatagctattgattaatgttaagggtgttctacccacagcaaagcacaccctcttaaaccaggcactgcctgggtcctggtcccgagagccctaccaggatcaggttcctgcaagccgtcagaatgtgggagcccccagcccaactgattgtaactgtcccctgttacctgtgacatgaacctccaacagcacctggaaacggttccctctgtcagctgctctgtagacagggctggggagatctcagagttcacacctcgcctgttgtaggggaggttgggggtagggtttggaatggccaagtgcccttggaacctcccacagctatggccgtcctgacctcatcccaggaactctacggtgaccaggaaccacccctctgacgaggtctgtagcggcccttctcagagtggaacagcccacagtgctagttgtgcctggtcttacctgtactccacggacctcggtgaagcaaaagcttcagggcagagggaatgaggcaacccagtggcagccccgctgggccccgtggctcctgctctcctattggacgtagaggcaggggagagacttctctatacaaatattctcatcacagaagggatgatccttgctgctctgccgtagggtttttgatgctgagctatgctgcacatgacgttaacctaaagaacttggactgagcttttaaaaaaggacagcaaacaattttataatccttaaagtgtaatagacggttacactagtgcagggtattgggggggctctttgggtgtggaggctgtcacttgtatttattgtgactctaaatctttgatagtaaaacaaatgtaaaaagaaatgtttgccaccagatgggaatagaagttccaataagcaggctggaatgggtggctatacgttgtatcacgaggaagttttagactctgaaggataataaatggatgatgtgtcaa

SEQ ID NO: 2099 - protein, 627 aa, Homo sapiens; identical to SEQ ID NO: 2097

SEQ ID NO: 2100 - DNA, 33290 bp, Mus musculus
  misc_feature (1)...(33290): n = A, C, G or T/U
ggaaatcaaacctgagtcctttggaagagcagccaatgctcttaaccgctgagccagctctccaattctttatcccatcacggtccaatctgatggccctgttgagaccactctgcctgtctgcctgtttctctgtctctctctcacacacacacctacaataaaaaaaaaaaaaaaaaccttccctttaatcataccatggagtggttgtgtgtcagcctatacaggaagaaagattcgccactgcagcctctggcaggagcctggatgctgggacccctatcgtgggcttcttactcccgaactaacagagaataagtgcacattattgtgaggcatgaagtgtatgccattttgttatggcagggtaagaaggtactcaggtctcttgccaccagaggtgggaaactcttcctgttcctggctgctatctcaccctttgcagctcctttcctcagctagggctattttgaggtcactgctatcctaatagtcaaggctagagcctgccaactgtccaaaagctgcatattgggggtgggggcagagagaactaccacaatcaacaatccttactctgaaaaagtgacctactggaagtctcaggtatgctgggatacagaggcaaagagtgttccctaagagtagccagtgcagtggccagcagcagccttgacctccccagaacacaactgaaatggagaacgttggtgttggggtgcagctcagttgggggacactagctttgcagctattatgcaccaattacttgggaactaaaattctccttataggagaagcagaaggtccagcaatttaccagactcagaagcccagaaagttctgagctgaggaggccccgcccagcactgtaaggcagcagaagtaagctaggggaagggacctccagggctgcagtttgcagactgcacggggagcctattcgttgagtctcacactcctccatgcatccaagaaccttgcaggttctccccactagattgaatgaaatcttttctttggtctatgactggtgttttttcgggggtgaatagacatttggtcattaccaccgcaggaaaagtcaccaaaaccatgcatgaagccccaagaaaggaaagaaggaaaaactgcgtggctgtgcatgtctgtcacctatgggaaacaagattcaaattctgcaataatttcaagtagcaaagttggccatgtgggctacataagatgaagggagggaggggaggaaaggcgtctgacttaggctggaggccagcacagtccatctaggccttgctagcacccaccccaggctcaaagagctctgaggtttgagggctggagtggaagcctccatctacctgtacaatagtcaccctaggcaaaagggaccaaacaagccttccctgtccttactcttcagggttcctggggcacaccaactcttggttttctaaatgagtctcagactgggttcaaacacctttctaagctggatatggcaatattggcctgccatcccagcaagaaaaccaaacctaaccaatgagcccagacagttggccatgcctcccgggtcagaggataacttgtggagctggcatgtgggtcccagaaggtgctgtatctgctgaaccttctcacccattagacactccatagtgatttactcactcacatgcaaatgagtgttttacccatacattctgtttgttgttgttcgtttttaaggcaggggttctctatgtagccctggttgtcctggaactctctagaccaggctggcctcgaacttacatagattctcctgcctctgcctccccagtgccagggttaaaggagtgtgctgccaccactagccttgtattttaaagcatggctctgcttgagacatatggtacacatctctcatcaaacaggaaaatgtaaggtaccttcagatacttcatacatgaaaggaaaatgcctggttgtcacagagtggcccttgcatggctgcttctacagaggacccaggttccattcccaacacccacatggtggctcacaaacattcgtaattccagttccaggggatcatgcaccctcttctggtctccatggacactgcatgcacacatacatacaggcaaaacacttgtgtagataaaaaaaaaataataatttaaaaaaaaattagctattaagacactaaggtaataatgcacaaagaaacctcatgcaccacagacatttccctagagggctatgctccaggtgcctctgagcatggacgaccatgggtgggtgaagctagtttacaagtctgtatgttacaatcattaaaggatcaaaatgggcagggtgtggtggcgcacgcctttaatcccagcactcgggaggcagaggcaggcggatttctgagttcgaggccagactggtctacaaagtgagtgccaggacagccagggctacacagagaaaccctgtctcgaaaatccaaaaaaaaaaaaaaaaaaaaaaagaaagaaaagaaacttagagtaaagcaaacagaagcttccctgctggggcaggaccaagcaatccagagcctcccccctgagaagctatgcaccccaccagagaagctaccataaaccacagcatacacatggcaggactgtaaccacgggcacattttgttctcgaagccaggaagacaatgaaggctaaggatttgcttatgtcttccatctaggaaatgcccattagctcagagcatccatgggatgctgcgaagtggcagggctgtactgtgcctgtccagtcagatgctacagaatggctacaccctggatgattggccctggaccctgctcctcacataccatggcttcttccacatggtcttgctgttggtgctgtcttggcgactcttgtatccttcgagatgggccttgctcagcgtgaggcctagagaacctgaaggccctttggagtgaacactgctgccagcccagaggcactgcccttctgagctgctcagtgacctacaggcagccatcatctgaaaagtcagagggtcctaggtgatgagttgaactcttcagttctctgttggtggtatactttcataaggctatctgggtaaggataggagtagatagactgaatgtttgtcatggtaactcttttgttttttatttgcacacagcatatgcttgtggctgtatgtgcgacactataatcaggtagacccagtacaacacagtcctccgctctgcagcatcccagcatgatcacttgtggacaacttgacctgtgtgtttgtcagtgttgtaaagaagggataaaaagagggcttatttgttcaggctgggtggtgggaggcagaagacagcacttcatatcttgtagctcttaagcgtgagagacaatttaactgaaactccatatcccagtggtaatgttgggataacaggtttaaccttcaggagcacaaagtggggttgtcacttcaggttacatatatctggttatagcaagggaaagagctattgcttaacagcttctagaacatctgacttgagagtctcaaatggttctgacaggaaccccatccctgagccacacaccccagcccctcactgggaaattctaggcaggaactccacccctgagccagactctcagtcctttcctgtaaaattatactatgtcactctacatgaactacatctccagccacgagaagtttctgaacaacattccaaacagacacacatatagagctggtgatatggttcagtggcatcaaaaggccctagcccagaaccaaaaataaataaataaataataataaaaaccaagaagattcatgggtttcaatttttcacacacacagtaagtagtccaaaaacactttatcagaactcaaatgagataataagtgcaaaccctatgacagcattctttttcagcacaattcctcttcagaatgaatggaacctttttttcctgaaactacagtcctaagctgagaaaggcagaaagccatcccaactatccaaggctggggatcagccaacagagtggcatgttacaatgctaggcaagtgggtaggctcaggcatgctgcgggtgtgaaggacacaatcaacaatgtctgcagcagctgtgcagcctgaacttagacttgacccagttcccacattaccagagttttccccatagttcccggggaagcctggggtaaaatgctattatgactagggttggtagtacacacttgggattctagcactaaagaggctgaggcaggagaatggaaagttctcaatcagcacagattccatcaagatggtctcaaagactaaccaaccagccaataaaaaaacctggtatggtagtactcaattgggatcttgtctcactactgaaaagataaggagttcaaggtcatctgccacagtttggggctgtctttaaaaaaaagccaaaatgaggggctcaggacacaggtcactctcaaaagacccagcactcacatgacagttcacaactggctgtaactctagctgcagattagaggacttctggcctctgcaagccctgcatccacatgtgtgcagacatgcatgcaggcagaataccatacatataaaacagaacaatctttaaaaagaaaagaaagaaaccaatccaaaaagagagccccaaagcaagccagctgctacagctttcaaatgctgattaaagtccctcagcactgccggcatggccatctctagatggaacgcatctcagagctgatggcgtagtcgcctctgaacctcatgcacctcaagcttgagctcccctccttcaaagagagacccagaaacccaaaccttcagagtacgctgccaacatcacaagcaacaataaaggagtggccccaaagtcactttattaacaagtggcttgaaagcacagagaggtgtctgctaacatcaccactagcacctcttccacaggcctcttctggagaagctgagtatgttatggctaacagcttagtgtctaaagaagaggctggtgtcccaagggaggaggaccggctcctccaaatgttggagcaatctttggctgccccaggtagacccagttatggggtgaggaggaaacgtttggaagtaagacctcactggccccagactgttgggtccaccagcatagacctggtagtgcaaaagagactgctagactgtcatagctggcccggcaagcaggtgcctgagtcacatcaattaaggacaatctgtgcaaggccaggagtggtggcatacacctttaatcccagcacttgagaggcagagacaggcggatctctatgagtttgaggcccgtctggtgtgtgagttccagaatagccagggctaaccagaaaaaccctgtctcaaaaaaacaaaaaaacagacaaagacacccaaatcaaaccaaaacaatcaccatcaattcaaccaagaaatagcccaggtcaggtttctggagaagctgggccaggagaagatagaatgccagcacaaggtaaagacctaggtctttctcctaataaagtctgactttgtcactgtggctgacgagggtcagggagctgggaaatggacattctccacccaaatgagcttgggccttctgggaaggtccctggttttccattgagaagattcttgaagtcatcagaaacagaaatagagccttgatgtccagcaggtgatctctgggttccacgcaggactcaagagccgaacagtctggaaaagtcagaaggtgaaatgaccatgaggacaggaaggggctgtggtaaaaactctggcacacagctgggcgtggtgatgcacatcagctatcccagcaccattgaggccaagcaggaggactacacagttaaaaccagcgtgggctacacaacaaactactatctcgaacacactgttggggattatttttcatgaaagtgcttcatggttctgcacttaaacataactattggctaggcaaggtgacacagtgaataaaggagcttgctgccaaacttaatggtctcagtttgatccacaggatcaacaaggtggaaggagagaaccaactcctgaaaattgttccctgccttccacaagcatactttatcacatgtgtgcacccctaggtaaacatataaaataataccacaaaaaacaaaaaccctgttggctggacactgaggtatatgcctgtaatcccaagaggcatgctaacactgatgcctgactgccaaggtatgaactcagatccctacttcacactataaaagccatttcagtggtcacacttgtgtgtctcaggactcacaggtctggggcagaggcatcagaagtctgagggcagcctgacctacaatcagactctgccaaacaaacaaacaaacaaacaccaaaacaatcaaagagaatggctgtaaaaaacagaagccagtagtaaatcctacctgctggcttctactaaggctttgaaggcaggaacatgcagtctgttggactttgaagccatccagtacaggttaacacaacatcaggggtgggagacacatggccagattggacttagagaccaccctccaatgtaaccagagttcttattttggaagaagggatagcccttgagcttcaactaggggctgataggatggctcagtaggtgccccatgccaagcctgataacctgagtttgattccccaggacccacattataaacagacaaactgtgaaaagggcaggagcaggtaatgaatgtgagcaccaagcaaggtaaacttacacgatcatgcagagcatcatgaacacattccacagtgcgatgaagatccggaaatacctcaggcttagtaaaaactctcggatgttgtctcctgcaaagccagaaagtatggttcatgaggctgtaacccaacctactaccaaacatctgtggcagcccctgatgcatccttgtggagcaccaattcccaatgcctctgaatggtgcaagaatgggcacgtggctcaagtctgtccaattagagttcttcctgagccgtgggtcctagttaccaggcccaggttggctagactgagaatttgccatctccacactttgtggccgaacttagagcactgcatgcgcaccagaacacatcacctgccatcgctctggtttacctccttagctttttgttttttgttttttgtttttttttttaataaatgttgttggttttttgttttaaaatagagcagaatatgtttaagtcagaggacaaactatcaattctctcctacgatgtaaaacctggggaattgaacccagtcagtcttggtggcaactgcctttgcctgatgggccttttagcagcttctgtaaattggattttgagaccaggtctcactctggggctgaggctggctcaaaactctaatcatatccacacttgtcatggaaaggacctctgtcatgtcacatcaacccacgctggggcggcagcagcggcagcggcagcagcggcagcagcagcacagcggcagcggcagcagcaccttcctgacacccactttcactatccctccagaacaccctctgaatcgccctgggctgagtcccacagggcaggatcactttctttacccacaccccgacagagcagtcagctaagtggctggcaatatggtacgcactcaataaagctgatgaacagagcatggtggagtactcttgtcattcaaacacctaggaggcagaggcagaggcagagggatcaggcattcaaggctagtcatggccctctaataccacatctcaacaataaaaaggaaaaagagaggaaagcgcaggttggtgagagagaacaggcaccctggaatcgacttaaagtgttgaaggtagaaagacatgcttacctgtgctgggttccttcgattcttccccaaagccttgtgtgtccttctttttcctataaagaacagcagataactccagctttccgtgaaacataaacaccatcggatttcctgaccctgacactcagctaggaagggcatgaacttcagctctgcccccgacttgcagtgtgacctggggcagtgatacaaccctctgtgagacactctcaaccagcctagtccatcacagctgggtgtgcagccacagacaggatagagtgggtccaagagccagaaaggcattcttgagggataagcctgagcatgaggctctttggagatgcaagcaatcccagggtgcagatttttttttgtttgtttaatattaatctgcaagtaagaatgagtgtgccgggccgggcgtggtggcgcacgcctttaatcccagcacttgggaggcagaggcaggcggatttctgagttcgaggccaacctggtctacagagtgagttccaggatagccagggctacacagagaaaccctgtctcgaaaaaccaaaaaaaaaaaaaaaaaaaaaaaaaagaatgagtgtgccatcccgcagcagttgtgtggagatcaaaaggacaatcaacaggatttctaccatgggggatccgggaatcggactcaagtagtcaggcttggcagcaagcgcctctgcccgctgagccgttccctggtctagagagtacagatttaaagatcctggagtgatacagaactgtcagagcctggtgaagcagcgcggaggcgtggctagaggtaggattagtggggcgtggagcatgcacagggcgggactggcggtgaccaagggtgtgggcggggactggctgtgggagggcctggctgtctgggacaccgcctgtcgcggcctactcacagtttaaagttgagcacagccccggcgttcatcagtagcgtcctgcggagggacagtaacggtcagtaagggtcacccccacccctctgactgccactctccgacctctaacacccctcattcatattacccgaacagcagtatgtctccgatcatccttacacccaaggcgtccgtcaaaccggaaacggaagccgtgatgaggggcggaaagtggaacgagaactgaccaattctgaatcagcattggttgggttcgactgaggatgtagcatgatgtcacctacagggcggagcttggggtgcgcgcgcgcatgctcagtgttacgtgccacagctggtccctgctgttgatgccgctcgggggttggttgggctatggattccgggctacagaaattgcgcccttgacccttgagccgcccgtgaacggcttggatatggatatgggcgcggcagatgcctgaactccaaaaggactccacttgggtccccacggagaactgcgatcccggctcagagtgcatagagtcaggatgacctcctgcctgagttgtacctcccacggacctcccaggtctgactcgagtaaccccacggagaatgagagtcctgaccggacagacttacagaacataaggcctggattaaggtctacagaggatggatcttaacttgtggggcctcctgaagcgggagggtcctaacttagtggatccagtctgggctggggtccacaaagaggagggttctgacttgtggagccttttagagagacaaaaccaaacagaacgtgagggtttggttgaggtccccttgtgggaggcggggttctgactttggatcctcaggaatgaaacatgatattcttggctgagatcttccgagggcgcgggttttgagggaaataggggtcctgaattggttagtcccatggaaaagggacaggattctaactacgcagatgtttaaggacaagattccctcttgtgtgtgctggatgcaggggacagatcgcctttttggctctgttgaacgagttctgacgtccctacggccccgcattttgggctcccggctgctaggagtcccccaccacccctcctctcccgaggggtgggggcaggcggggggcggtgcctggcagtggggcgggctcagtggcgagggagcattcgtcgggcagcggggcgcgggacgcacggggccggggaggcgccctccatcgccatggacctgatgtcagcgctgagcctgggcgagctagcgctcagcttctcgcgggtgccgctcttccctgttttcgacctcagctacttcatcgtctccatcatctacctgaagtatgagccaggtgagtcgaggattgtaggagttaccaggagggaggttgcccctagcttgatgatggagacgaaaggaggagacaggctagatcctggagctggatgggggaggaggcagaggctgagatcgtggagtgctcccacgctcgcgcaggtggaggagcgaaccctggggacagaggcgctgtggaaaggaggctgcaaatgaggtgggagggaagaaaaggagcgctcttgtttacggttaggaggacaggtgctgcggggttggggttgagggcgggggcaacgaaaaggccagagtcaggttagagcaaggattcctgaacttaatcttgggcaagggggattgatggtggcgaaggttccaaatcaaggatcggacctgcctgggcgagggtcagatgttctggacgtcagctgccatgacctcccttaacgcccttgaattgactgcctggtgactatataaggactggccatgctgggtgctgcgatcaggttcgggggaaagtgacacccatgtcccctctgtactgcatcttttggcatcttcttccctcccttctcacatgccagctgggccagctcgggcctgggatccttcccacttatggagcctaaaccgttccaggacagggcaactttgggtcagcttcctttcaagagtcagaggaggatagaccctacttctttgattaaaaaaaaaaaaagttaattacttttacttatctctgtgttgtgggtatgtgtggaggtcagaggacagtttacgggggtcactggtcaaactctggtggtcaaattcatagacaagctcctttaccagcagagtcatcttgctgctaccgcacccctcctccaaatctgctttaatgaggacaaatgtagctcgcctctaaccccagaacgtagaacgtagagaaaggaggaaagcaagttaattccaggacagccagggctattgatgagttcttgtccagtgtgactacagaccatctcaaaaacaaacataaataagtgactacataaatgaataaataaataaataaatgcctccctggagcgttctatttttattacaagttcagtgtaagcaaatgtgtcgtgtttgtcttctgtagttttagttattctactgaaccttcaaatttgaaggacagggtaatttccttccagggaagttaagacccttctgtgggtgggtatgtaaattaattacttttggggtgacaaaaccagactcctatgtttgcttagggatggggtggtgcttcaagatggcccacaggtggaaggaaaaaaaaatcaagtttaaaaacagtgttctgataaccccaaaagggcccatctccagagctttctcagatgaaattgtacacgtgtccttacaagcataaatacatgctcttatgcaaacgggattagcgagactgtcgggcatgcgtgttgggtctctttccctgtgcacaagcaacaaggctttgcaaggtgaagttcttgtttgtgctattgtttggagtaacggggtttccagtctgaggaagaattcctggtggtttctgtggaacccagcacaccccaagatccactgtgaggaggtgggaaccccctggaatggacttagtatggaagtgtgctgaaaatggggtgctctttttatttttaactcttttcatcatttagtgtgtgtgtgcgcgtgtgggaggattgtgaatgtgccaggacatgcatgtggacggcacaggacaacttgacagagttgttctccctcccctgtgggggacttggggattgaacttaagtaaaactcactgccccctttattttatttgtgttaaaaaaaacattttcagttattgtcattattagtatatgtgtatatatacacgccccagagtgcatgtagagatgaaggacaactctgtccttccatctttatgtggactctagggatcaaactcaaatcaccagacatcactgggcagcaagtgctcttaccgctgaatcatcttaccaacccctattaaaaaagcaaaaaaaaaaaaaagccaggatcccactggttcctcgggctagcctcaaacgctttcctctttcctcagcctccctggtgcttgaattctagatgttccatgctcattcttgtctgaatacctctgcaggaatatcacagtaagccatctttgctgcaagtgtaggagacagaattttccagaaggttctggttttatactttagaacttcatcagttcttcaaccctagctgcatgtcagatttcctgtggtcttttaaaagtctttttccaggagtgttggtgcatgcctctaataccagcacctgggaggcaaaggcagaggcagttggttttctgtgagttccaggccagacactaaaaaactctacctgaacctggtgcagtggttcctgcttcttgttccacccactcaagaagtagaggcagaaggattacaagttcaagaccagccacgagcaacttagccagatcctgtctcaaaataaaattgtattaaaaaattttattactacactttatttgcttatttattgtgtgtgttaggtgctaccatagcacatgggtgagagacagaagacaatacaggtttcaggttgctccttccacatgtgggccccaggggttgaattcaggcctttaggcctggtggcaagtattgttacctgctaagccacattactggcctcaaaaatttttacagggatgtggttagagcccctgcctacaccctgctagtgtggcctgggtgggcatggctcagtcttagagtgacagcctaaaattccccagtgaggggcttgttcgtagaatgtttgctaagcatacaggaagccttgaattccatccccactctccaaaactgaccaaccaaattaacccagatgaatttaatcagaatatctccatgcttgcatttcaagcccattttcccagtgtttgctgcaagacatctacctgaggctattccttcaaaatttgggaacgaggaagaaggctgaagtaaataaatatttgctgagcttgcaagtcctatgggttcctggacagccagaatgacatatttattaggctgcaagaactactcatttcccttaggaaattaaggtggctggggagctgctaagcaatgcatatctgtaattttagcaaacaaaaactgagtgcattctgggctacatatcaagcctctttctcagttaaagatggtggaacacaggtgggaatggtggtgcacgcctttaatcccagcactcgggaggcagaggcaggcggatttctgagcttgaggccagtctggtctacaaagtgagttccaggacagccagggctacacagagaaaccctgtctcgaaaaaccttaaaaaaaaagatttatttattttatgtgtgtgagtagactgtagctgtacagatggctgtgagccttcatgtggttgttgggaattaaatttttttaggacctctgcttgcttcggtcaactccgcttgctcagtccctgctcgctctggcccaaagatttatttattaatataaataagtacactgtagctgtcttcagacacgctagaagagggtgtcagatctcattatgggtggttgtgagccactatgtggttgctgggatttgaactcaggatctttggaagaacagtcagtgctcttacccgctgaaccatctcgccagccccccttaccttttcttgatgcatgctcttgtgtagcacaggctagccttaccttatagtctaggatgaccttgaacttctgattcgcttgcctctaccccaactcctctgcctctaccccaactcctacgctgggatgacatgcgtcccccaccgcactcttgtgcttggcatggaaccaaggctatgtgcatgttaggaaagcattttacccttggaaccagccttcatttgtttgaactaaactggccttatgtagtgcaagtgagactaaacttgctatgtagctaaagagaaccctgactttctgagtcttctgcctcatctcccaagtgctgggactacagacatgcccaacaataaccttttttggattttggttttggtttttcaagacagggtttctctgtgtagccctgactgctctagaactcactctgtagaccaggctggctcaaacttacagagatctgcctgcctctccttcccaaatgctggtattaaaggtatgtgccaccactgcccagctagactccatttttttaggctctcactagtggtccaggctggcctcaaactcatggtcctcctgagtcttgactgctgtgattccaggcctatgccactgcataggtttctgcctggtttctgttgtgctggggatggaatccagggcttcgggtatgttccctgagctacagcaccaattaatagacaagctctttttcaggccagttttaggttcacaacaaaattaaattgaaaagtacaaagctctgtaattttggttgtagctcctgagatatgctgtgctctgcgtcgtagcactaaaaaaaggaaaaaggaaaagaggacaagttcttttttttttttttttttcttcctttggttttccgagacagggtttctctgtgtagctctggctgtcctggaactcactttatagaccaggctggcctccaactcagaaatccacctgcctctgcctcccaagtgctgggattaaaggtgtgtgtcaccacacccagctaagaggacaagttctattcccacccaccccctagtctttgataccagaagacactgggggattctgggcagtggctccacccatgagccatgcccccagcccatggttgggagtttctgagcagggtgctaaactggactactcttccagtccacagtgggtggatttaagatttatgtgtgaaatttcacccctagatatttcaatctcattctaggccccagaatatctctggtataattgctaagggctaagcaatttctttttgtcctgggtaggcaacctttgatagagccagtagagatgggagagtgagattcacagtgactggagcctatcctttctgcagtggaaaggttgaggcaggaggatggtaaatcaaaagccagtctggattagattgaggcactgtgccaaaataaataaatacatacacagggctggagcagtggcttggcagttaggagtaccagctgcttttgcaaaggatccagggtccctcacaaccatctgtaaccccagctttcggggatttgacaccctcttcaggccttggcaggtgctgcactcacacgatgcacaggcacacatgtatgcaaacactcatacacaaagtaaaccttttttttctttggtttttcgagacagggtttctctgtagtcttggctgtcctggaactcactttgtagaccaggctggcctcgaactcagaaatccgcctgtctctgcctcccaagcgttaggattaaaggcgtgcgccaccaccgcccggccaaagtaaaccttttaaaactaaacataatgagttgagccattatacctcaagagccataaacccatccctctgccttttgacatccaaagaaactgaggctcactggagactcatgacagacacttgggctcaggcagagccagaaggggacatagtgctttatataggaggtgcttgtgaaacaaagcctggagcctgtttgttcatgggtcatgcactgaaatactcagccccctgccccatttaannnnnnnnnnnnnnnnnnnnggaataagactgtttctggcagctatttttagaagcacatgcaagtgtcattttctgtggagctggaggaatgcttgacagccttggctcagtggactcaccagctgttcctgggggtcacaggggaagtatgctttaaatagatacagggtggcttggggtgtgagggttctgtcccctcccatccttttacctccccttctctctcctttctccctcccctccccctcttctctcttccccgcctaaggtacaatccagggcacctgacaaggctgcttttgcttttgtgtattcttttgttcatatcatttaagttttaagtacatttatgtgtgtatgtagggggatgacctgcatgaatgtttgtatgagggtgtcagcttggagatacagatagttgtgagctgctatgtgggtcctcttcctcttaaccactgagccatctccagccccagccttgaatttctgattcacttgtttcacctcctgtgtgctaggatgacaggcctgcatcaaccacaccagctttatgtggtgctatagatggcagctaaggcttccaacattctaggcaagtgctcagcccttagctaaattctttctaccaactcagcacagcccaggttctcccaggttctccctccagcaggctagtcttggcatccccacctaattactgagcagtacacccaactcttaaggttcctcgacctgtaactctgacaccttggggaccagtttcctgtgaaccttgggatcagaccatatccagacagtaacaagggcccttaggtggttcgaacatggagctacatggctgacagcttggtcctaaaattgttctctgctaaatgaaacgagtcagaaagggaggggctctgtatgataagcagatgcaccaggagacacccagctgtggctttatgaggtggggacaatagtgacataaaggtagaacctaaccattaacaaagactgtggaaatttacaaatattatcttaaatttacttattcatttgtttacctgagacgggatctctctgtggccctggctatcctacaacttgctctgtagaccaggctggccttgaactcacagatctgcctgcctctgctgggagtaaaggcatgctaggctacttttattgcttttgtgagtgcaaaaccttcacacacagcaggtatgaaagtacttgtcaggaggcaacctgcaggaatcagatctctgtttccatcaatcacgtgggtcctgggatggatctcagcttggtggcaaatgcttggtgacaggaaccagctcagtggctcctgtctgggacctgagatggctttctcaatgggcatgggcaagtccgtgcttggtggtaagagagccagctcaacatgcagcttaactggcttccatcccagcatccgataagaactgtagaagccccgaatttaatctccagcacccagtgggctagaagggatgcatgcaagcaggtgtggcatgttcctgggatgaattcatgtgccctcacaggagctgtggagctgtcccggcgccaccctgtggcgtcctggctgtgtgccatgttgcactgttttgggagttacatcctggccgacctgcttcttggggagcccatcattgactacttcagcaacagctccagtatcctgctggcctctggagtgtggtgagcactgaggcggggaagggaggaccccggcaccagggaggagggagtttgaaggaaccagggaccccctagtcacagtctgccgccatcctgcctgccctcttcatctgcctctgcgctaagcgcagtaaccagtggacacccttcccctgaccctgggtcttctctgcatctgctctaagctcaaccaccagtgtgcctgcctttccctctgatcatagaccttctgtcctcaaggtacttgattttcttctgtcccttggacctcttctacaagtgtgtctgctttctgcccgtaaaactcatctttgtggctatgaaggaggtggtgagggtccgaaagatcgctgtgggcatccatcacgcacaccaccactaccaccacgggtggttcatcatgatcgccaccgggtgggtcaaaggtaaacagaattatgacagaaaggacagaaaaaagtcgccgcagtgagatggctcaggagcttgcagccaaaacttggtggcctaatttgattcctaggacccacacagtagagcattcactcccacaaggtattcagtgaccaccacatgagcaccgtggtgcatgccacctacacacaccatacacagtaacaacaaagttaataataatcatggccagcaagatggctcagtgaggaagggcacttgaggccaaacctgatggcctgaatttgatgctcggaacccacgcactaggagaaaccaagctctaacaagttgtcctctggcctccatacatgtgctctggtgtgtgtgcacatggacacactccctaccaccatacaaagtatacataaattgcaacttttaaattttccagagtctctatgcagccctggctagcttagagctcattatgtagaccagactggcctccaactcacagagatccttctgccgctgcctcccacatgctgggattagaggtgcaccatcatatcttccactcttgggccccacagggtggagggagagaacccactccacaagttgtcctctgacatctgcattcatgctgtggcatgctagcacccccatcccgcacacagaatacaactataaaaaagaattattaattttttaaataaataaagtaaaaatcccagtagttgactaggtgttggggtgggctcctgtcccaacactcaagacaatgaggattaggagtcctgggccagcctgggcaacacagtgagacttaagacagcccctgtaggtagtgatacatccgattgcttcctgctggttttgccctgactgtacctgtgaaactgggggatggagttgttttgagcctcagtttcccatatgtaatggatgatcaccctgaggctcagagtctcctcaacagaaagtcccgtgtttccttgggaattgaggctagaagaaaggagggtgtgggggtggccagttacctcagtggtgccctgccctgcaggctctggtgttgccctcctgtccaacgtggaacagttgcttcgaggtgtctggaagccagaaactaatgagatcctgcacatgtccttgtgagtacccctcctgctgacctctgttctgcctcgcctggccccacattattcatcttctagagatgccactaaggtggggataggaagagcttctgcaaagaggtgatatttgattggggttttgaagagtgaataggagtttcctggctacaaaagaccctctacccagagtctagaatcacggccagttgttaggtttgaaaactgcaggaccaagatgaggatgtgggtagggagcaaggaaatggagcaggagtgagggccacaggcaaggcaggtcctgtggcatggaaggtcatgggggatagtgggcagggccacacaagaaacattcacaacccatgtaggaccactgctgatatttctttttattgatttcattttttttttgttttttttttcttgatctttctgtatgtctgtgtggtatgcgcatgtgtgggcacatgtgtacatgtgtgtgctgggggttatgcttgggaccatcatattttttgaggcagggtctctcagtgaaaccctgagtccctcacatgcccaggcttgctgcccagctggctctgagcaagcactttaaccatggaaccatcgccctggtccacatttctctagtgttgggaaggttggagggcagccttcaggagtccccgcccccactgcaccagtggggctcggtctcacatgcctccttagccctctggatggtgaccagcatctgctgaatccaaacccatgcccaccacattattgtatgaggtgaccagcagccacccacactctctgcacctagtgtttcaagggttttgtggcttttccagttgctgtggcaccatatgtgactgacagaagcaattcagtgaggagagacttacacaggctcacaatttagggctacagaccgtcatggtaggaaaggcatccaagcccggaggcagcagcgcacagcttgtacccagcagacagtagtgtagttcagatggcttctccttcatgttcagtccagatggtgccctgtggccttccacagtcagcagcagttgttcttcctggattcacctaatctagataatccctcccacatatgcccagagatttgcctgtgggttgattttttaaaaataatttatttaactttattttatgtgtattggtgtgagggtgtcaggccccttggaactggagttacacatagttgtgagctgccatgtgggttggagaactgaaccggggttctttggaacagctgacagtgctcttaatcacagagccatctctccagcctctgcgggttgacttttaggcactgtcaaattaacaagattcaccattcaggcaaagtggcacaaaactttaattcccacattgggaggcagaggcaggaggatctctgtgatttgcctgccagcctgagctacatggtgactgttttaggggtgggggcattgattcaccattcaggctccatcgcccacacagcctgcatctcttcgtctcagtcaagagatggtgggcatctggggctggagagatggctcagaggttaagagcactagctgttcttccagaagtcctgggtttgattccctgaacctacatgctggctcataaccatttgcaaccctattcatgggggatcagatgctctcttttggcctctacaggcattgcttacatgtgatttacagacacatgcagataaaatactcttatacataaaattaaatcaataaataaaacgttaaaagagaaagatgttaggcccaagaacctgcagtgattgctctgggagccacctttagaagccaggtgtggcagcacgcctgtcctgtcactggtctcttagctactgttgcccgcataaaaccaccatgaccaagcatttgggcttcctgccagagggctgagtctgtaatggtgaggagactccacatcaagcagcagatgttgtggcaagggcagagagctcagggctcagggcttgagccataagcaaaaaacaggaagaaggcctttggttctcaaagtccctgcccccagcagcacacttcctcagcctcccccaaacaacaccaccaacttgggaccagacttgggttcattctcattcaaaccaccacaaccaggaaggaagagacaggattccctgaggttcactggctagcccacccagcaatggtagattggaggtcgggaaagagactttgtctcaaaaataaggtgcagggcctgggagacggctcagtgggtaaagagagcttgctgccaagcctggtacccgaggccctacacggtcaaagggaagaaccaactcctctacctaggccccctgcacatatatagcacatgagcagcctgggccccagcaacaggagcgggggctgtccctgagtctgttgcctgcctgcctgtgcatcccattcccctaactgggctgccttgtctggcctcagtgggagaggatgtgcctggtcctgcagtgactgggtgtgccagggggaggggttgtatatgtgggtgatacttggaggggggctcctcctcctcaaagaagaagaggagggaagaatgagggctctgtgtgagggggtactaagaagagagggggagctgatatggggataagtgaataaatacaaaaaataaattctaaaaaaggtaatttttaggttattcaaacttaacaggaaaataaaaagaatcaactctcccaaagttgcctacttgagtgctagagagacagagactgagacacatactgggtggtaacagaagaagtaggtgtggctgaggaggggcagtaactcagctctcagtaacagtgcagatccttctgtcagaagcagtgagcagcaccagggactccagaagcgagagaaacaattcatttcacagccttgggaagccagaggtcagcctagagtaaagggtaaaactggagtcctgagttggtcacagactttttgcttgtttgtttgttttcaagacagggtttctctgtgtagccctggctgtcctggaactcactttgtagaccaggctggcttcaaattcagagatccgcctgcctctgcctcccaagggctgggattaaaggcatgcgccaccactgctcacagacttttaatttccatgactggatgtcaccgccctctgaattcctcagtggctgagttccttcccctagcatagtctccaccggaggttctccaccttccatggacttgagattgcccagttctgctctccagtgtgagctcagactgaacttctcaacccagtgtcagctaacaagctctcaggcaagcaggcagctgccagccgggaaagacaggtctggtgcctcctggtcggtcagctgtggctctggggagctttatatgaagctctgactgagaatggccgtggttatttatatcttaccccagccccaccaaggccagtctgtatggagccatcctgttcaccttgcagcagactcgctggctcccagtgtccaaggccagcctcattttcgtcttcaccatgtttatggtgtcatgtaaggtaagccacccctgcctgtgacctctacttccctggaatggggtgggggtactcagaaactaccgggggagacttggtccacctgagatagatggaagaaatttatcaggaaattgaggtacgagggccaaggaggtagggatggagatggcaagaaggagcttccaggcacaggctgggggtgcttgtatgggacagtagggggacaggaatctgatcaaaccagaaaggagtcttgggccttccctgtccttccacagggctgagggttgtccccagctcccccaaacatagaaagctcctgcctacaaatggttcattcttaggagaagaccacagccttggaggctaaggcaggaagatccatatgagtttgaggccagcttgggctacatagtgagttccaagccagccagggttacatagtgacattctgtttcaaaaaccctgggccctgtggcaagaaagtgggcccagggtcaggagttcaaggttatgttcagcttcacagcaaatttgaagccagcctgggctacatatgactgtatctcaaaacaacaacacaaacaaaaagcaagtaagaaaacaaagaaggagaaaaaggagggcgtgagagggaatgaatgtattgtttagagttctagaatgtgaggcctaaggtagcaggggtgagtatggtggaagcaggggtggggtacagtgaggtacctcttctagcttcagatgattgacaccttctatggccagattggctacatagtgagtaggaggctagcctgggctacatggtaccctgtctcaacaacaacaaaatgtaatcctgaagtccaggtgttgggatgtactgttgtcatgggtgaccactggtcacagcatccctaggctgcccaggtgtggacactggaagtcatgcctcttcagagtccaggatgggggctcgtgcacttgggggcatgggaagctggagggctggggctggctcaatcccctcactgctcctttgctctctcctctcctaccatgtgtttcctggactccccttaggtgttcctgacagccacacactcccacagttctccatttgatatcctggagggttacatctgcccagtgctgtttggggcaacttggggaggcgaccatcaccatgacaaccatggagcaccacatggcatgggactaggcacccagcactccggcctgcctgccaaggccaaggaagagctgggcgaaggatccaggaagaagaagaccaagaaagcggattaggggttggccccaggaatccactgcgtgcttggtagaaggatgtggactcaaagaaactcagaacttaggggcattcagggctcagaccctcccctccccccgccctgctctctaccaccctcaacttccccatctgcagtttggagccatcagcaattccaagggctgatgtgggctaaattagtgtggaggaattcaacagatgtggaaaaccctgccctctgccagacccctcaaaaggtcacagcctttgggggcacacagtctaggcccaaagccctggctggtaggctcttggttttcattctgtgttctgtctaattatatcttgtaactaaaagaatttaaagccacatggagactcaattatctagatcctctcgagagccaggtgctggggtcccatgtccttccgcactcaggacctccctagaattttgtgactcctgctggacatctttaggcaaatggccttccttctctgagccttctgtttctgttctgtagcatggagaccccaggtcctcctgtgtacaaaagggtctttataatttcaagcagttgcttaagcagcgtgctagtgagaaggagactggagcagcatgaaggacagtggcaggctgcttggtatgtaggccatttgtgtttgaggccagaaggtctcaccagatactcagctgagcatgagcaggcacatttagggcagactgctaacaggaggggggcttgagttcctaggtgcccacaggtaagaggtgtgggtgcagagcagagggtccaagagccaacagccttggttactcacaattgggctctgggtgtatcaggtgtccctcatgcctgatcagcatagttcattcaatcattcaacaaacacacagatccacacatgctcgctatacagtgtcatgctgctcctctgaggagcgagccttatacaggggaagggccatggtcgccaacgtctccagggcacctgagagaggtgagcatggggtcctgctggtctcaggcttatgtgaggctcagatctagttgaagtacccagtgtagcccatttgttgagaaaatgctcctcataactttgcctggaggtagggtaggccctgaggctggaagctcccgagtttcatccccttgatgtcaatcaaagctcagtgtgagtgatcagccaataaatctggtgcgagtaaatcaagctctttttctttattcagcctcaaaatgtagggatccagcagagtctgttttagagatggcccaggcctccagggataggagatgggtctgaagcctgggaagcagggtcaagcatatctgagttctccaagataagtgggaaggtgcacacctgtccagaagctgaggcaggaggatcactgtttctaagcctgcctgagtgaaaccaaaaagtaaggaaggaaatgaggaagagaggagagagagaatggggagggggatggggaaaggagggagggaggggagggagagaatggggaaggagggggaaatagaggaaggggcagggaagagagaggtgaggaggagaggggaggggaggggaaaactcccttttgccactcagcacttccactttcaggaatgtgctgcaaaggggacctagtgatcatggcttttcacagtagctaaaatttggaggcaggaagaaaggccataaacccctgacagcggatgggtctggtgtcaagacagaaaaccggccctaaacctcagtgggttctggcctgggattagcctccagagcagctgggatgatcacaaagaagtagccttttgccctccaacccaaggcgagggtatcacaaattctgattgggcggactgaatggaaataaaaagcctcccagcctattttaggagggaggcgtgatggctgctggctggcctgtggtcagggaccattgccagaacaggctgccatggtgtccacaaacaggtgccagaactctgacagcccggtcttaagttcaggttaattttagcaggattcaagtttggtagcttctattgtctgatattgagagcggggttctttatactgtttaaacaattatgtttagcatttaaatccaagtctgggcaccatatgatgcgtttataaaaagatagagaatgaatatgttctataggggtgtggtgaggtatggggggagggggtgccttggcgggcccatgccaagatatcccttccccatgagagaccagccacacgatggtatggtatagaatagagtttattcagggcatgggaggggagttaagagggtagtagaggcagagaaaggcagagagagggagaaagtagagaagtagaggctggccatgaccacatggagagaggggtagaggaagggaatggtaaggagagagcaagaggaggagagaagcaagagaacaagagtaagagaggaagggggcaagcagcctttttatagtgagtgggtcaggcatacctggctattgcaggtaactgggggtgagcatacttaggctgttgccaggtaactgaggggtggagtttagtgctaacgggaaataatggtagagcacctgcctagaatcctcagtgaggggctggggtgtggctcaggggtcgatcacttgtctaatatgtgcaaggccctgggctctatctatgccaccatacacacatacatccatactgtgaagctcagtgacaactgatttgattgttgttgttgtgtttgtttgtgtgtttgtttgttttgagacagtgtttcactgtgaagctctcgctggactggaactacgtagaccaagctggttttgaactcacaaaactagggctgcctgtgcctcctgaggactgggagtaacggcatgccacaccactgttgagcctcactgtgaagctctgactaacctggaacgctgtagatctgctggccactcattcactcactgatgccagccctcactgcctccatttccagaactctcttccttttaaagggtgcgatggaaccctggtccttggcattctcagctagtgttctgcggcagagccctgtcctcaactccttccatcaagagaagcaaagttgtcactaactccctcgctccatgcctctgccctttctaccttattcatttgtcatctccagcgatgtcccaggagcttatcgtatttcccccactgccctatttcacttggctgaatgtcctccaacttcatctgacttgtcttgtcttgttttgttttgttttttgcccaggttggctccaatttgtagaggatctacctctgcctcctagagctggggcaggtgtgcactcggattctctttaaagatgacgaagggaaacgggaggacttggctcagcaacagccccacacagcacgcagctttcctctccctgttccaggcccccatccagcaacactgcacacgtgggccggagctgagcctacagacagatttcacagctggcttctgcctggaggcgggtaggaaaagtcttagctcaattagcaaaggaaactaacctctgatagagctgtggaagctatggtcaaagggaaggtcagacactggatgttggtgggtccctgctggcagcctgggtttgcttagaaccactcgtgagcccgatgaactcctgggcaaaagaaaatactgaaacggggagactctaagcacatacccaatctggctcccaagtctggggtgctgcctgccaagcataggacaggctgagttctaagggccactgagcacaggtaccccaatacatactcagtatgtatcgagtccagctctgtcctcaacaaacatggcttcgcacttttgtctttaagtaaagtataaatggcacacagcccctgactgcacctcccctgtagttgctctttgttatcacagcagcaaggatcaaacattttaatttcctgaacagttgaaaatatagattatctatcttgtcctttttagaaaggagttgacagccaggcagtggtggcacacacctttaatcccagcacttgggaggcagaggcagtcggatttctgagtttgaggccagcctggtctacaaagtgagttccaggacaatcagggtgacactgagagaccctgtctcgaaaaacaaaaaaaaaaaaaaaagaaaggagttgataactcctannnnnnnnnnnnnnnnnnnnnnnnnnnnnnnnnnnnnnnnnnnnnnnnnnnnnnnnnnnnnnnnnnnnnnnnnnnnnnnnnnnnnnnnnnnnnnnnnnnnnnnnnnnnnnnnnnnnnnnnnnnnnnnnnnnnnnnnnnnnnnnnnnnnnnnnnnnnnnnnnnnnnnnnnnnnnnnnnnnnnnnnnnnnnnnnnnnnnnnnnnnnnnnnnnnnnnnnnnnnnnnnnnnnnnnnnnnnnnnnnnnnnnnnnnnnnnnnnnnnnnnnnnnnnnnnnnnnnnnnnnnnnnnnnnnnnnnnnnnnnnnnnnnnnnnnnnnnnnnnnnnnnnnnnnnnnnnnnnnnnnnnnnnnnnnnnnnnnnnnnnnnnnnnnnnnnnnnnnnnnnnnnnnnnnnnnnnnnnnnnnnnnnnnnnnnnnnnnnnnnnnnnnnnnnnnnnnnnnnnnnnnnnnnnnnnnnnnnnnnnnnnnnnnnnnnnnnnnnnnnnnnnnnnnnnnnnnnnnnnnnnnnnnnnnnnnnnnnnnnnnnnnnnnnnnnnnnnnnnnnnnnnnnnnnnnnnnnnnnnnnnnnnnnnnnnnnnnnnnnnnnnnnnnnnnnnnnnnnnnnnnnnnnnnnnnnnnnnnnnnnnnnnnnnnnnnnnnnnnnnnnnnnnnnnnnnnnnnnnnnnnnnnnnnnnnnnnnnnnnnnnnnnnnnnnnnnnnnnnnnnnnnnnnnnnnnnnnnnnnnnnnnnnnnnnnnnnnnnnnnnnnnnnnnnnnnnnnnnnnnnnnnnnnnnnnnnnnnnnnnnnnnnnnnnnnnnnnnnnnnnnnnnnnnnnnnnnnnnnnnnnnnnnnnnnnnnnnnnnnnnnnnnnnnnnnnnnnnnnnnnnnnnnnnnnnnnnnnnnnnnnnnnnnnnnctgtgggatctggtgccctcttctggcctcttcaggtattgcatacatatgaagcacaggcatatgcaggcaaaatacacagacaataaaaataaatccagatatcttttttttaaaaaaagattgtttttctttcttaaaataaaatttaaaaattatatgggtgcttttacctgcatttgtatctgtgtgccaggaaaaggcatctgatgccctggaattggaattatagacaggtgagaactgccatacaggttctgggaatcaaacccaggttctttgcaagagcagccagtgtgttcttaatcaccaagacacccctcaagcccctcttttccccctccttttcttgaatttctgggactagaacctagggactcacacatgttaagcaggtgcgtcccccacctgcatcccacacctgcatcccgcacctgcatcctgcaccttcatcccacacctgcatcccgcacctgcatcctgcaccttcatcccgaatcctcttcttgcttttagtttggatgcatgatcttgctaagtagctcagactagctttgaattctttaaaacattttttttcttttctttttcttttaaaatgttatttatttcatgtatactcatatgctctgctgcatatatatatgcctgcctgaagaggtgattgtgagccaccatatggttgctgggaattgaattcatgacctctggaagagcagccagtgctcttagccgctaagtcatctcaccaaacctaaaaagttttctttaattaaaaaaaaagttatatgtgtgcttgtaaggtgtgatagtccatgtgtgcctgtgtgtgtccagaggaagatgtcagtgtcctctctctctttctgctttactcccgtgatacaggctaactgaacaggaagccggtgtcttgtcctagcagtgaggctggttacaactgcagcctggatagtaagagatcttagaggatcctcgtggtttttcaatgtgattgcgatattttgaagaatttcctatttttttattttatttattgaaatagattttttttcctccgtcaatcaatatatcctgatcatggtttcccctccccctgctccctcccagttccttcctctctccctcccatccagatccattcccttttctcattaaaaaacaaacaggtgcagggctggagagatggctcagagattaagagcactgactgttcttctgaaggtcctgagtttaaatctcagcaaccccatggtggcttacaaccatctgtaatgacatctgacaccctctactggtgtgtctgaagacagctacagtgtaatacatataaataataagtaaatcttaaaaaaaaaaaaagagtactgtctgccctttcagaagtcctgagttcaatccctagcaactacatggtggctcacagccatctatgatggaatctgatgccctctcctggcatacagatataatttcagatggagcactcatatacataaaataaaaaataaataaatcttaaagcaaacaggtgtttaagggataataataaaatacagcaaggtaaaaactattatctcagacttcatcaaaacaagccaacagaagaaaaagagcccaagagaaagtgcaagaatcagagacccacactttacttacacttaggaatcccataaaaacactaaactgaaaaccataatagagaagcacagaggacctgtgcagatgcatacaggctctgcacacgctgcttcagtctctgtgagttcctgtgagcgttgcatatgttgattcagaggatcttgttctttggtgtcctccatcaccccctcttccatcctcctcttccacagggttccctgagctctgaggggagggatttgatggaggcatcccatctttgggatgtttcaaggcctctcaccctcttcatactatctagctgtggtctctgtgttgttcccatctgctgcgggagtagcttctctgatgatggctgagcaaggcactgatctgactctagcacatatcatttggagtcattttattgctatttttttaaaagacatgggtaaaaacaaatactactagatattatgcaatgaacattcacctaaaatgggatgtccacaaactcaggttcttggtcacacaaacagtgtcagttatgggttccatcttgtggatggatttaagtcaaatgagacatgggttggtatctcctacaagctttgtgtggcccttgcaatagcatgccttataggcagggcacgattatagatcaaagattggtgttcatgtttctcctttggtagctgcagagtactttctggtaccaaagactctaccacacagtgaggaaggctcaatgtgggcaccagatcagtgtctccatgttcagtgagttgtgtaggtgttgtcttcggcactggggcattgccaatggtttgtttagagcagcttattgtcttagcaacagcttgggttgttcccggatttttatgaaaaccctctggctaacaattcagtgagatgtagaaaaatcaagcactgaaagcttcatttggtgacaatgttccatatatgaatatattagaggaggcttctactgtattaggtttcataatatgcttcaaagggtgtgtcccttccaatgttcccaccctattagccctctcactccccacttccaactcaatccttccattctagctccttccccaccataactttccattctaactccacccccatcatgacgatacattctagctgcacccaaccataactatccattctagctccacccgcaccatgactatccaatcgagcttcacccccaccatgactatccattctagctacacccccaccatgactaactattctagctcaacccccaccatgatgatccattatagttctacccccacaatgacaatccattctagctccaccccaaacatgacgatccactctagcttcacccccaccatgactacccattctagctccactcccaaaacaatgatacattctaactccacccccaccatgaggatccattatagctccaacccaccatgactatcaattctagctccacccccaccatgagaatccattctatcttcacccccaccatgacaaaccattctagctccaccgccaaaatgacgatccattcaagatccacctacaccatgactatccattctagctccacccccaccatgacaatccattctagctccaaccccaccatgactatccattctagttccacccccaccatgatgatccattccagcaccacccccacaatgactatcgattctagtatcacccctaccatgactatccattctacctccaccccccaacataacgatcatttctagcacaaaccccaccatgagaatccattctagctccacgcacatcatgatgaaaaattctaactccacccccatcttgactatccattgtagctacacacccaccatgaggaacatttctagctccaggcccaccatgacaaaccattctaattcaaacccaccatgacgatctattctagctccacccccaccacaacgatcattcaagctccacacatatcatgatgatccattctagcaccacccccacaataacaatccattctagctccaaccctacactgactatccattctagctccacccctaccatgacgatccattctagctccagcacccccataatgatccattctagctccacccccactatcacaatccattgtagctccatccccaccatgactatataatctagctccacacccaccatgatgatccattctaactccacccccaccatgacaaccaatcaaggtccacattctagctccacccacataataataatccaatctagctccactcccaccatgattatcaattctaattccacccccaccatgacgattcattctagctccatgcacaccatggcaatccattttaacctcatcaccaccatgacgacccatcaagctccagccccaccgtgatgctccattctagctccacccccaccatagcaatacattttagctccaccccctccatgaagatccattctagctccaccctcatcaagatgatctattctagctccactcccaacatgaggatacattctagctccaaccacaccatgatgatccatt

SEQ ID NO: 2101 - DNA, 1591 bp, Mus musculus
gccctccatcgccatggacctgatgtcagcgctgagcctgggcgagctagcgctcagcttctcgcgggtgccgctcttccctgttttcgacctcagctacttcatcgtctccatcatctacctgaagtatgagccaggagctgtggagctgtcccggcgccaccctgtggcgtcctggctgtgtgccatgttgcactgttttgggagttacatcctggccgacctgcttcttggggagcccatcattgactacttcagcaacagctccagtatcctgctggcctctggagtgtggctctggtgttgccctcctgtccaacgtggaacagttgcttcgaggtgtctggaagccagaaactaatgagatcctgcacatgtccttccccaccaaggccagtctgtatggagccatcctgttcaccttgcagcagactcgctggctcccagtgtccaaggccagcctcattttcgtcttcaccatgtttatggtgtcatgtaaggtgttcctgacagccacacactcccacagttctccatttgatatcctggagggttacatctgcccagtgctgtttggggcaacttggggaggcgaccatcaccatgacaaccatggagcaccacatggcatgggactaggcacccagcactccggcctgcctgccaaggccaaggaagagctgggcgaaggatccaggaagaagaagaccaagaaagcggattaggggttggccccaggaatccactgcgtgcttggtagaaggatgtggactcaaagaaactcagaacttaggggcattcagggctcagaccctcccctccccccgccctgctctctaccaccctcaacttccccatctgcagtttggagccatcagcaattccaagggctgatgtgggctaaattagtgtggaggaattcaacagatgtggaaaaccctgccctctgccagacccctcaaaaggtcacagcctttgggggcacacagtctaggcccaaagccctggctggtaggctcttggttttcattctgtgttctgtctaattatatcttgtaactaaaagaatttaaagccacatggagactcaattatctagatcctctcgagagccaggtgctggggtcccatgtccttccgcactcaggacctccctagaattttgtgactcctgctggacatctttaggcaaatggccttccttctctgagccttctgtttctgttctgtagcatggagaccccaggtcctcctgtgtacaaaagggtctttataatttcaagcagttgcttaagcagcgtgctagtgagaaggagactggagcagcatgaaggacagtggcaggctgcttggtatgtaggccatttgtgtttgaggccagaaggtctcaccagatactcagctgagcatgagcaggcacatttagggcagactgctaacaggaggggggcttgagttcctaggtgcccacaggtaagaggtgtgggtgcagagcagagggtccaagagccaacagccttggttactcacaattgggctctgggtgtatcaggtgtccctcatgcctgatcagcatagttcattcaatcat

SEQ ID NO: 2102 - protein, 194 aa, Mus musculus
MSQELWSCPGATLWRPGCVPCCTVLGVTSWPTCFLGSPSLTTSATAPVSCWPLECGSGVLSNVEQLLRGVWKPETNEILHMSFPTKASLYGAILFTLQQTRWLPVSKASLIFVFTMFMVSCKVFLTATHSHSSPFDIGYICPVLFGATWGGDHHHDNHGAPHGMGLGTQHSGLPAKAKEELGEGSRKKKTKKAD

SEQ ID NO: 2103 - DNA, 1829 bp, Mus musculus
ggcagcggggcgcgggacgcacggggccggggaggcgccctccatcgccatggacctgatgtcagcgctgagcctgggcgagctagcgctcagcttctcgcgggtgccgctcttccctgttttcgacctcagctacttcatcgtctccatcatctacctgaagtatgagccaggagctgtggagctgtcccggcgccaccctgtggcgtcctggctgtgtgccatgttgcactgttttgggagttacatcctggccgacctgcttcttggggagcccatcattgactacttcagcaacagctccagtatcctgctggcctctggagtgtggtacttgattttcttctgtcccttggacctcttctacaagtgtgtctgctttctgcccgtaaaactcatctttgtggctatgaaggaggtggtgagggtccgaaagatcgctgtgggcatccatcacgcacaccaccactaccaccacgggtggttcatcatgatcgccaccgggtgggtcaaagttgcttcgaggtgtctggaagccagaaactaatgagatcctgcacatgtccttgtgttcctgacagccacacactcccacagttctccatttgatatcctggagggttacatctgcccagtgctgtttggggcaacttggggaggcgaccatcaccatgacaaccatggagcaccacatggcatgggactaggcacccagcactccggcctgcctgccaaggccaaggaagagctgggcgaaggatccaggaagaagaagaccaagaaagcggattaggggttggccccaggaatccactgcgtgcttggtagaaggatgtggactcaaagaaactcagaacttaggggcattcagggctcagaccctcccctccccccgccctgctctctaccaccctcaacttccccatctgcagtttggagccatcagcaattccaagggctgatgtgggctaaattagtgtggaggaattcaacagatgtggaaaaccctgccctctgccagacccctcaaaaggtcacagcctttgggggcacacagtctaggcccaaagccctggctggtaggctcttggttttcattctgtgttctgtctaattatatcttgtaactaaaagaatttaaagccacatggagactcaattatctagatcctctcgagagccaggtgctggggtcccatgtccttccgcactcaggacctccctagaattttgtgactcctgctggacatctttaggcaaatggccttccttctctgagccttctgtttctgttctgtagcatggagaccccaggtcctcctgtgtacaaaagggtctttataatttcaagcagttgcttaagcagcgtgctagtgagaaggagactggagcagcatgaaggacagtggcaggctgcttggtatgtaggccatttgtgtttgaggccagaaggtctcaccagatactcagctgagcatgagcaggcacatttagggcagactgctaacaggaggggggcttgagttcctaggtgcccacaggtaagaggtgtgggtgcagagcagagggtccaagagccaacagccttggttactcacaattgggctctgggtgtatcaggtgtccctcatgcctgatcagcatagttcattcaatcattcaacaaacacacagatccacacatgctcgctatacagtgtcatgctgctcctctgaggagcgagccttatacaggggaagggccatggtcgccaacgtctccagggcacctgagagaggtgagcatggggtcctgctggtctcaggcttatgtgaggctcagatctagt

SEQ ID NO: 2104 - protein, 165 aa, Mus musculus
MDLMSALSLGELALSFSRVPLFPVFDLSYFIVSIIYLKYEPGAVELSRRHPVASWLCAMLHCFGSYILADLLLGEPIIDYFSNSSSILLASGVWYLIFFCPLDLFYKCVCFLPVKLIFVAMKEVVRVRKIAVGIHHAHHHYHHGWFIMIATGWVKVASRCLEARN

SEQ ID NO: 2105 - DNA, 2115 bp, Mus musculus
ggggaggcgccctccatcgccatggacctgatgtcagcgctgagcctgggcgagctagcgctcagcttctcgcgggtgccgctcttccctgttttcgacctcagctacttcatcgtctccatcatctacctgaagtatgagccaggagctgtggagctgtcccggcgccaccctgtggcgtcctggctgtgtgccatgttgcactgttttgggagttacatcctggccgacctgcttcttggggagcccatcattgactacttcagcaacagctccagtatcctgctggcctctggagtgtggtacttgattttcttctgtcccttggacctcttctacaagtgtgtctgctttctgcccgtaaaactcatctttgtggctatgaaggaggtggtgagggtccgaaagatcgctgtgggcatccatcacgcacaccaccactaccaccacgggtggttcatcatgatcgccaccgggtgggtcaaaggctctggtgttgccctcctgtccaacgtggaacagttgcttcgaggtgtctggaagccagaaactaatgagatcctgcacatgtccttccccaccaaggccagtctgtatggagccatcctgttcaccttgcagcagactcgctggctcccagtgtccaaggccagcctcattttcgtcttcaccatgtttatggtgtcatgtaaggtgttcctgacagccacacactcccacagttctccatttgatatcctggagggttacatctgcccagtgctgtttggggcaacttggggaggcgaccatcaccatgacaaccatggagcaccacatggcatgggactaggcacccagcactccggcctgcctgccaaggccaaggaagagctgggcgaaggatccaggaagaagaagaccaagaaagcggattaggggttggccccaggaatccactgcgtgcttggtagaaggatgtggactcaaagaaactcagaacttaggggcattcagggctcagaccctcccctccccccgccctgctctctaccaccctcaacttccccatctgcagtttggagccatcagcaattccaagggctgatgtgggctaaattagtgtggaggaattcaacagatgtggaaaaccctgccctctgccagacccctcaaaaggtcacagcctttgggggcacacagtctaggcccaaagccctggctggtaggctcttggttttcattctgtgttctgtctaattatatcttgtaactaaaagaatttaaagccacatggagactcaattatctagatcctctcgagagccaggtgctggggtcccatgtccttccgcactcaggacctccctagaattttgtgactcctgctggacatctttaggcaaatggccttccttctctgagccttctgtttctgttctgtagcatggagaccccaggtcctcctgtgtacaaaagggtctttataatttcaagcagttgcttaagcagcgtgctagtgagaaggagactggagcagcatgaaggacagtggcaggctgcttggtatgtaggccatttgtgtttgaggccagaaggtctcaccagatactcagctgagcatgagcaggcacatttagggcagactgctaacaggaggggggcttgagttcctaggtgcccacaggtaagaggtgtgggtgcagagcagagggtccaagagccaacagccttggttactcacaattgggctctgggtgtatcaggtgtccctcatgcctgatcagcatagttcattcaatcattcaacaaacacacagatccacacatgctcgctatacagtgtcatgctgctcctctgaggagcgagccttatacaggggaagggccatggtcgccaacgtctccagggcacctgagagaggtgagcatggggtcctgctggtctcaggcttatgtgaggctcagatctagttgaagtacccagtgtagcccatttgttgagaaaatgctcctcataactttgcctggaggtagggtaggccctgaggctggaagctcccgagtttcatccccttgatgtcaatcaaagctcagtgtgagtgatcagccaataaatctggtgcgagtaaatca

SEQ ID NO: 2106 - protein, 294 aa, Mus musculus
MDLMSALSLGELALSFSRVPLFPVFDLSYFIVSIIYLKYEPGAVELSRRHPVASWLCAMLHCFGSYILADLLLGEPIIDYFSNSSSILLASGVWYLIFFCPLDLFYKCVCFLPVKLIFVAMKEVVRVRKIAVGIHHAHHHYHHGWFIMIATGWVKGSGVLSNVEQLLRGVWKPETNEILHMSFPTKASLYGAILFTLQQTRWLPVSKASLIFVFTMFMVSCKVFLTATHSHSSPFDIGYICPVLFGATWGGDHHHDNHGAPHGMGLGTQHSGLPAKAKEELGEGSRKKKTKKAD

SEQ ID NO: 2107 - DNA, 48884 bp, Homo sapiens
cactacctccctgagagggccctttcttgagagaatcttctctcacccatggcccccagtgaaagagttggcctgggtcagaggttggcacattttctctgtaatgggtgactgtttactaacagttctggctctgcaagccatgtcatctctgtcacacaactcaactccaccgctgtgacacagaagcagccacacacatgaacttttgcgaagttcattcacaaaaacaggcagtggggagatttggcctgtggtctgatgacccttgacctaagtggttatggcagaatcaagaacccccaccccaaatggaccagagtgacaccaaggtgggtcaatcagactctgccccaggaaacaaaatcaggaccctgggctactgactatgcaggtcttggaaagttgagctgggaggatgcccgaggctgctgttctggtcacagactagcagatgagggagtgaagatgctggtcaaacaggagaggatgatgaagcaggtgcacaggaaagacgagaatgagagaagcacactgacttcttccctgccccaggacctttgcaaagatgagaatgagaaccatgctgacttcttccctgccccaggacctttgcaaagacgagaatgagagaagcatgctgacttcttccctgccccaggacctttgcaaagatgagaatgagaagcatgctgacttcttccctgccccaggacctttgcaaagatgagaatgagaagcatgctgacttcttccctgccccaggacctttgcaaagacgagaatgagagaagcatagaagcatagtgacttcttccctgccccaggacctttgcaaagacgagaatgagggaagcatgctgacttcttcccttccccaggacctttgcaaagacgagaatgagggaagcatgctgatttcttccctgtcccaggacctttgcaaagacgagaatgagggaagaatgctgacttcttccctgccccaggacctttgcacatgccacttcctgtgccaccatgcttttctccagctctgcaaatggcaaacgtcttcttgtcctttaggtcttgatttattattatttgtttggagacagggtcttcttctgttgcccaggctggagtgcagtggcaggatctcagctcactgcaacctctgcctccagggctcaagtgattctcccacctcagcctcccgaggagctggaactataggcaggcgccactacactcggctaatttttttatttttggtaaagacagggtttcaccatgctgcccaggctggtcttgaactcctgggctcaagcaattctcccaccttggcctcccaaagtactgggattacaggcctgagccactgcccctggccgttcctacaatttcatgtaagttccttgatctcctcacaagccttctttgttcctaggcaagtctcatacatgctctcagatcctctctgccaggtaggataccttggcaacagtcttcctgggaatacatcacggtccttgtgatgagggtgaaatgccatcctccccagatctcctatgtcctggaagcatcttcgcaaacagccactggggtggcacgcagactggacagcaaccccacattcggagtctcaatcactcaggacagacaactttttgtcctctctctttctgggggaagcatacagggatggacccacagaggccaagaacaccagattctcccgtcgtgtcttttcctaaatccatttacagcaaatctcacaattcgttaacagtagtatcagagttatggccccagtgctagatggaaaggcaatctgcttgagttttctcagcctaatgagaaaatgaaaagccagaatttaaaacaataaagtctgaatacatttctactggcttccagcccaggtggagcaggatctggcagtgtgctggacatttaaaccatattttccacctcggcagatgcagaagaactggtgagacgtgacagggccatgggctcagggacggcatctcctggcagcccctgcagaggtgccgggcatagccgggggctggagaactccatgttccaataaaagttccagcccggtttggtggggacacagggacagagtttaaccccttcagatactggttccctcacttacttattttgaaaacagaaagcagggccgggtgtggtagctcacatctgtaatctcagcactttgggaggccgaggcaggtggatcacatgaggtcaggagttcaagaccagcctgaccaacatgatgaaaccctgtctcttgtaaaaatacaaaaattagccaggtgtggtggtgggcacctgtaatcccagctactcgggaggctgaggcaggagaatcgcttgaagcagggaggcagaggttgcagtgagccgagatcacgccactgcactccagcctgggcaacagagcaagactcgatctcaaaaacaaaaacaaacaaacaaaaaaaacagggccgtgcacagtggctcactcctgtaatcccagcactttgggagcccaaggtggacgaatcacaaggtcaggagatcaagaccatcctggataacacgatggaaccccgtctctactaaaaatacaaaaaatcagccgtgtgtggtggcacgcacctgtagtcccagttactcgggaggctgaggcaggagaatcgcttagacctaagaggccgaggttgcagtgagcccagatcgcaccactgcactccagtttaggcgacagagcaagattccatctcaaacaaaacaaaaaataaagaaaacagaaaccaggatacaagagtgatgactgaaaagacagagaatgaccatcaggtgggtcaccctggagaaggagactaagagacgacagtgaaaggaaagggcaggctggactcacacaatcatgcagaacatcatgaagatgttccacagggcgatgaagattcgaaagtatctgaggctcagcaagaattcccggatgttgtcacctggaagaatcagaaagcacttttatggcacagctaacatcccatccctactgccacctcagcagtggatttttgtgacttccacccacccggcgcttgctgcctccaacttcggcaacagtgtggcttttccttttggtttctccctcttccctaccctcatcaggctgtgtctaccactgaccaatcccctgaaagcaccaagcccctctgcctctgattggctcaagaaggggcatgtgacccaagtctgtccaatgagagtccaccctgggacttttcccccaactactgggaaagagataccttctgccaggcttactgagctgggaagatgtaagctcagtaagctcagtgcccacaggccaaatccagcagcctcttccacctgtttttggatggcctatgagctaatagtttttacttttttttaaaatataaagatggggttttgctatgttccccaggtgggtcttgaactcctggcttcaagtgatcctcccgcctaagcctctcaaagtgttgagattacaggcatgagtctccatacccggctggtttttacattaaaaaaaaaagaaagaagactattttgtgagacacaaaaattacaagaaattcaaatctcagtgtcaatgaataaagttttatggcacacagccatacccattcatttacatatcatgtcctgctgcttttgtactacaacagcagagctgagtcacattgttgtgccagacagacaccatatggcccgcaaagccctcagatatttactatgtggccctctacagaaaaacatgccaacccctgctctggggtcatctttgccaaccctaaccagtctcacagtaaaaccaacataaaagaaaggggaattgagagctgcagagagtcagatactgactctaaccctaaccctaaccccaactccaaccccaaccctaatcttgaaggactggtttgacacctaaacccagggtgcctgaaaacaattctgttggatgtttcaatttgctttaaccactttgagctgggtttgcagtgtttgtaactgaaagcatcctaattcaggcaagtgaaagggaaggtgtttcttggtgatgacttactctggtccccttgaatgccaaggaacagaaacccctccgagggaaggcaatttagtacgtgaagactccagagacctgggttctagacccttcttccagggtttccagtcaatcactctccctctcaagccctccagaatgaaaagaatgggtccagattaggccaggcatggtggctcacacttgtaatcccagcacttcaggaggccgaggcaggcagattacctgaggtcgggagttcgagaccagcctggccaacatggtgaaaccacgtctctactaaaaatacaaaagttagccgggtgtggtggtgcatgactgtaatcccagctactcaggaggctgaggcaggagaatcacttgaacctgggaggcagagattgcagtgagctgagatggtgtcactgcactccagcctgggtgacacagcaagactccatctcaaaaaaaaaaaaaaaaaaaaaaaaagaatggctccagattaggtgatctacaagggtgctacccgaagtatctgcagactggggctgcatggtaagtacagcatacacaacacaagcccagaaatttctactttttcagggatgacaacctgacatccctgctccatccgagcttgtgctgaacacaccatcttgctgaaaacggtttagacgagcctagtattatctagccgacaggattagtcacgtgcagcacaacctgtatacagggctgatccagcacagactagaaacattaaatgcttggtctgtttccaggaagttttgagaggcgctgctcagcaagacccttcccctagcgaaggatcgtgaaaacaggacctcccaccatcaacagatgccaatcaaacgttactcattccaggccgggtgcagtggctcacaactgtaatcccagcactttgggaggccgaggcaggtggatcacctgaggtcgcgagtttgagatcagcctggctaacatcgtgaaaccacgtttctattaaaactacaaaacaattagcagggcgtggtggcgcgtgcctgtaatcccaaatcctcgggaggctgaggcacgaaaatcacttgaacccaggaggtggaggctgcagtgagctgagatcacgccactgcacgcctgggcaacagagtgagactctgtctcaaaaaataaaaaaaggttactcattccaggcaacagcagtatacaggggatacagaaagaaacaaagaccggtggctctgccccaacaagcatatggggaggagaaatactaaacaaatattcacatgtgactgctctggtgggaaagtttgggtgtcctgggaatacacactgcagagacccaacatggcatgtgcatggggaagggtgggaggtaaaaaaaaagcctttccagccgggtgccgtcgctcaagtctgtaatcccagcactttgggaggccaaggagggcagatcacctgatgtcaggagttcgagaccagcctggccaacatggcgaaaccccatctctactaaaaatacaaaaattagctgggcatggtggtgggtgcctgtaatcccagctaatagggaagctgaggcaggagaattgcttgaacccaggaagcggagattgcagggagctgagatggtgccactgcactccagcctgggcaacagagagaggctccatctcaaaaaaaaaaacaacaaaaaaacaaaaaacaggctttctgaggaagtgccagagctccaagttctgacctcaaacatgggcagtttaacaaatgtgagctcaaatcctgcctctgtccttctgcacaggtgacctggtgacctgggaccatccctgcactatctatgtgcattccctcttgtgtcaataggggtgtcaggcagctaggaagaccttagcacactgcctggcacgcatgacgctctcaacaaatgcagccactatggtattacagttaagccaggcaaagaggatggagggcaaagagcagctcccacaggggaagcagcaggtgcagcacctgggctggaaggagactggacacagcaaagcaggaagctcctgacagagcactggtgccctgcctggcatccctgtcactgatgctcctgccactttgtgccaaatctcccgcccactggagctctgattcggatctgtacagtgcaactctagggcctggtagtgccttccacgtgggggttaagtaacacatggctgctgagtcaatgtatgaatggatggatcaatggatagacggacagatggtctagtgattgagtgcacaaccgctagagtcagaaaaacccaggttctaatcctgattctcattgattccctatgtggccacaaaaaagttgagccacatctctgaccctcagtttcctgatctgtaaaatgggaaagtgaccattatcttttaagaatggagggagaatgcaacactaacaggaagcacctaactgggtcagcacccaagggcaggcccccaaaaaggggagctgctggagtgtcttcaaaatctcagctcggccaggcgtggtagctcatgcctgtgatcccagcactttgggaggctgaggtgggaggatcgtttgagaccaagagttggacaccagcctggttaacacagcgagatacctatctctacaaaaaacatttagaaaattagccaggcgtggtagtaagtgcctgtagtcccagctacttgggagcctgaggcaagaggatctcttgaacccaggagctcaaggctgcagtgagctatgactgtgccgctgcactccagcctgggcaacagagcaagaccctgtctctaaaagaagaaaacctctgttcctcagggttcccccatccttgggcagtgctccatcatggcatccaccgccttgactgtgacgccgcctcctcaaatggccttcccttccacaccccagcaggagggcaaccccatcaccatcctgtgactccctgcctctgtcacctaacgtcacctctgtcactatctattccctgcttagaaaccatgtgtcccaccccatggtaagttccactctatctgtcttacccctgctgtaccccagcacctagcacagtagccagcatgcgttaggtactcaaatatctggtgaatgaaagaattaatgaatggatacaatagtcatgtacagatccccttaagactccaaatagttacacaatcaaattcagcaggaagtgtaaattctggggcctccagggcccaggcagatgatagacatatgaaggggttagggctgggatgaggcagagtctacaggccccacctcctcagagtccttctcaactacactcaatagatgcaaacagctctcctgaatcttgagttgcagaatgttccaatttttcaagaaaaatcagacatcttaatttttatataaaatctcctgattaaaaatctaatgttggcatctaattttaaaagtggcaggtctgcagcactctgaaagcaacagctatgtgtgaggttgttcattcattcattcacaggcatcggaggacgggtacggcaagaacaaaggatgggacaagccaagctagggcctcttctctgaagtttacagtcatatgtgaggggcagacattagccagatgacagcaaacataacagaacattataacggtaggaagtgatgtgagtgctcacatcagggaggtctggtaggagaaagaaatagatgacagaggtaggcagaaaggctagcacattctcagtcatctcccactcacacacacgctcaattaaagagaaaacttgtggctcacgcctgtaatcccagctcttcgggaggccaaggcagggatcacttgaacccaggagttcgagaccggcctgggcaacgtggagaaaccccatctctacaaaaaatacaaaatttagcctggcatggtggcacacacctgtaatcccagctactaagggggctgaggtggaaggatcactttagctcaggaggtcgagtctgcagtgagccatgatcgcaccactgcactccaacctggacaacagagcaagaccttgtgtcaaaaaaaaaaaaaaaaaaaaaagagaaagaaagaaaacgaaggtagggcttggcgaaacagaactgtcctctgaagtggaccatgcaattccaggatccaattagaccttacctgtgctgggctccctggactcctccccaaagccctgcgtgtccttctttttcctacaaagaggagcagacagtgtccactttcaatgggacatagagtcctcagccccctgacccccagctcagaaggccacaaacactaagtttcagccctggccctgccgcaaacttgctgtgtgacctctgacgttcaatacccttctctgggcccccactgcccggacaatcacagccaggtcagcagccaccgaccgtttacaaagtggcccgacagtgcgggtgcagggcggaaggtccgcggtggggctatttcttgggggatggggcttaagctctccaggaaggtgaacagagggacaaccaaggaacggagagtatgggtttaaggtctctcggggggtggggggcgaggaagataaaccaggctggaggcgtgcccagagggcggatagggcggggcctgcggcttgggggcggggcctgagaagtgcgccgagatcacgcttatgagggcggggctacgggttccccggatggagccgcagtccggccgcgacctactcacagcttaaagttcagcaccgccccggcattcatcagcaacgtcctgcagagggagaattacagttactaggggcgcccccgcgtcctgcctggctctctcttcccagcctctggtccccctaattacccgaacagcaggatgtctccgatcatcgttacggccgaagcgtccgtcagaaccggaagcggaagccccagggagggaggggagaggagcacaagccgaccaatcctaaagcaacagtggcgagggctgggccaatcgaaggtcaaggctgggagggtcccgccctctgcaggccagacccccttaggggagcgcgagcgccccacctcgctggggaggccccgagagccagaatgggaggagcggggtctcctgggggcgggattgggtcacgcgttcgaagcgtgccgcgcatgcgtgaggtctcgatgccgtagggttagctgggcagcaattcctactcactttctggggtcccaaattgggcttctggacaaaaggaatcctttgactcctgagctgcacagggtgcggggtcctgacgcagtggggtccctagaaacgggtgccccaaccaactgggctctaaaatgagatcctcctgggccccatggggaacgggggttcccactgagctgccccccacaagacgtcctgatttgcagagccccaccggagacggggttcctgatcgaacggaccctatggggcagaaaagtcttgacggggctccacagaggaccgaggtcctaacctatctccacggggaacaggggttctgattcatggggtcccaccatggcgtaggggtcctcactgggctccaccgaagatcggggtcctaattgagcccacggggacaaagtcctggccgatccggccccctgggaacgggcgtcccgcgtgggtgggctccgtgagggacgggcccccagaacaggcagctccccagcctccctcgccttgcacgggtgccccgcaccccgcctcgctgggcggaacggggtagcgatggcaggagggtcaacgcctgggacgcccgaccgtccagctgcgtccgtggtgctgggcgtccccaccacctgtcccggggtgggccgtcgcccctcctctcccgcgggggccgggcctggggtggcgcctggcgggcgggggcgggcccagctgcgggggcgcagtcgccgggccgcgggcggcgggacggacgaggccggggccccgggtggcacccggcaggcgggcaggcgggcgccatggagctgctctcggcgctgagcctgggcgaactggcgctcagcttctcgcgggtgccgctcttccccgtcttcgacctcagttacttcatcgtctccatcctctacctcaagtatgagccaggtgagccggggcggggggctggaggggaccggcagcgggtggcgcgggccggggcagctcgggggtcgcagagaggggaagcccgtgcgtggtggagggagcgagggacaggttcaaggattgcatcgtgggagtaggcaggcgctagaatcgtggggttctctcacgccggggtgagcccgggggagaagcccccaggacgatgaagctgggggaggggaaggagaggcgtgcgcgggtttagaggagggggaacaggtgcttggggtcggggctcctggttgggtcagagctgcaggaacttgggcaaggggcgccggctgtggcgagggtgcaggtgggggtcggtgcatctgttctggccgcgcgcaggtgtgacctccctccttgaccttggcacgcggattgagagcgccagcggagtgtctataagggccactgcgctgggggctgcggtcaggttcagcgaaagtgacaccggttctcctccccactgcaactgcccagcaccctccactcccctcccttcccccacggtgctgaatctccgagcccccacgggaattcttccagccctggctccagatcctttccacttacggagcagaaccggccccaaggctgggtgacttggggtcagtgtcctccatctcagctccagactccacgctggggaggtcacaggagggtacagcctgcttcttaatttttaaaatgaggatgaatggcttccttagaacgtgttctatttttataaaaggttcaccgtgaacaaatgtttaaatgtttcttgttcaccgttattctagaacaccagcaacttactagataatagattttaggcttagaaaaataaaggaaccccaaacttcataagcctttctcccacttagatgtaaattaccactatagctcagaaaggaaatagctttattctcagaggataaaaataagcgcccctgtttactaaaaactcaaactgaaaagggcaaaggaaaaaaagagaattactgtcaacatactggtggccagccacctttcttgatgtctcttctattcatttacggctatatagttataaacgtaaatgcacgcttttttttttttttttttttttgcggttttttttttagatggagtttcgctctgtcgcccaggctggagtgcagtggcgtgatctcggctcactgcaacctccaccttccaggttcaagcgattctcctgcctcagccttctgagtagctgggactacaggcacccgccactacacttggctaatttttgtatttttagtagagacaagccttcaccatgttggccaggatagtctcgatctcctgaccttgtgatccacccacctaggcctcccaaagtgctgggattacagacgtgagccactgcacccagccaatgcacgctcttatgctaacaggattacactctatttgctaggaatttttattctatttttgcctatccacatgccagagcctattttcttaaaagctatcctggagaacattactttgcaaaacaaaataggcttttgtgttgtcctagcatgaacatggggctatctttcctttctggggaagaattcttggtggttcaggccagttccttgggcagttgcagaaccttagaaaatctgaaactggctgggcacagtggctcacgcctgtaatcccagcactttgggaggccaagacgggcagatcgcctgaggtcaggagttcgagaccagcctggccaacatggagaaaccccgtctctactgaaaataaaaaaattagccaggcatggtggcacatgcttgtaatcctagctgcttgggaggctgaggcaggagaatcacttgaacctgggaggcggaggttgcagtgagccgagatcacgccattgcactccagcctgggcgacagagcaagactctgtctcgaaaaaaaaaaaaatctgaaactgaggagggttggagccctgtgggaatgtaggacacaaatgtcttgagaaaagaggtctccaagctgcctgggaacttgcaggaaggttcaagatatttctgcagaagtcctagaataagccatccaggctctaagtgccagagcctgaaggttcctgaaggctgagaagtggttccaaaccctggctattcatgaattcatgagacgctcctgggagctttttttcttttcttttttttttttgaaacggagtctcgctctgtcgcccaggctggagtgcggtggcgccgcctctgctcactgcaagctccgcctcctgggttcacaccattctcctgcctcagcctcccaagtagctgggactacaggcgcccaccaccatgcccggctaattttttttttttttgtatttttagtagagacagggtttcaccgtattagccaggatggtctcgatttcctgaccttgtgatccgcctgcctcggcctcccaaagtgctgggattacaggtgtgagccactgcgcccggcctcctaggagcttttaaaccccctatctccaccccccaccaattgaatcagaatattaatctcccctccctcagtgactgatgtctgttatcagggctgaggatactccacccagttcaacctcctcctttcataactggggaaacaggaaatagtggctaagctatcttaaatacacaatgagcctgtggtcccatggctggtcagttgcagcctcgggactcagcccaggtctgcttgactctaagaatcagtacaattgatgtgagattggtttccttagaaaagaaaggtgttggaggccagatgtgatggcttatgcctgtaatcccagcactttgggaggcgaggcgggtggatcacttgagcccaggactttgaaaccagcctgggcaacatgacaaaaccccgtctccactacaaatgcaaaaaaatagccaggtgtggtggcgcacgcctgtaatcccaggtacttgggaggctgagacatgagaatagcttgaatccaggagacggaggttgcagtgagccgaaatctcgctgctgcactccagcctgggtgacagagcctggctgagactctgtcttggaaaaaagaaagaaagaaaagaaaagtgaggtgtcggattgaactgttagtcccagtttggtgtgcgtgctgggtatctgtaaattttcttctcagaatttgtgtgctggaccagctacagaatttgccaggccgatacaaagtatcagtgtggggccttttgttcagaaattaagaatttcatagccaggcatggtggtgtgtgtctgtggtcccagctacttgggaagctgaggctggaggatcacttgagcccaggagttggagctcaactgcgcctggctgggtcaggctttcttgagaatcctgagaatggatgaagctcagagtgtggtcctcaacagagcagcatcaatgttgcctgggagctgcagcgagctatgatcaccccaccgccctccagcctgggcaacagagcaagaccgtgtctcctaaaaaaataataataataataaaaaaagaatgtcagcataggtcagataatctcagcatttggggaggtcaaggttggaagattgcttgaggccaggagttcatggccagcctgggcaacattgtgaaaccccttctctataaaaaatacaaaaatggctaggcgcggtgtctcatgcctgtaatccgagcactttgggaggctgaggtgggcagatcacctgaggtcgggagttcaagaccagcctgacctacatggagaaaccctgtctctactaaaaatacaaaattagccggacgtggtggcacatgcctgtaatcccagctactagggaggctgaggcaggagaatcgcttgaacctgggaggcagaggttgcggtgagccaagattgtgccattccactccagcctgggcaacaagaatgaaactccgtctcaataaacaaataaataaaaattaaaaaatgcaaaatacaaaaatattagccaggtgtggtggcatgtgcctgtagtcctagctactagggaagctgaggtcggaggattacctgaaccctgcaaggtggaggctgcagtgagccatgatcgtgccactgcactccagcctgggcaacagagtgagaccctgtctcaaaaaaaaaagaaaaaagaaactaaacgtctctgaatcatgggagtcagttctaccactagcactgagtaaacaccacaatggttatttcaccaccatgagcttcagtttatttgtctgtgaaatgggatcattggtaagagaaccccagactccctttcctagcgattgtaaagatctattgagaattttgtcagggataaggtctaaggcatttgtgaggggtggtgatgtttatttggaagtctagggaggaatatattacttgggatactggcattttctgggtcaggcttgcttacttttctgtttcttttcttttccttttttttttttttgagatgcagtcttgttttgctgcccaggctggagtgcagtggcacgatctcagctcactgcaaccttcacctcccagattcaagtgattctcctgccttagcctcctaagtacctgggattacaagcatccaccaccacacccagctaatttttttgttttgttttgtttttggagacggagtcttgccgtgtctctaggctggagtgcagtggctcgatcccggctcactgcaacctccacctgccgggttcaagcgattctcctgcctcagcctcccgagaagctgggattacagacacgcgccaccatgcccagctaatttttgtatttttagtagaaacggggtttcaccacgttggccaggatggtttcaatctcttgacctcgtgatccgcccaccttggcctcccaaagtgctgggattacagacatcagccattgcgcctggcccattttttttgtatttttagtagagatgagttttcaccatgttggtcagggtggtctcaaattcctgaactcaagtaatccacccgcctcagcctcccaaagtgctgaaattacaggtgtgagccactgctcttggccaatttaactttaaaaaaatttttttttttcgagacagggtcttgctctgtctcccaggctggagtgcagtagtacagtcatagctcactgtggcctccaactcctgggctcaagcaatcctcccacctcagcttcccatgagcaactgtgcctggctgggtgaggctttcttgagaatcctgagaaagaatgaagctcagagtgtggtcctcaactgagcagtgtcaatgtcacctggaagctgattagaaatgcagagcccctgcggtggctcatgcctatagtcccagcactttgggaagccaaggtggctggatcacaaagtcaggagtttgagatcagccaggccaacatggtgaaaccccgtctctactaaaaatacaaaaactagccaggcatggtggcgggctcctgtaatcccagctacttgggtggctgaggaaggagaatcgcttgaaaccagaagatggaggttgcagtgagctgagatcgcaccactgcactccagcctgggcaaaagagcgaaactccatctcaaaaaaaaaaaaaagaaaagaaatgcagagttctggccaagctcagtggctcacacttgtaatcctaacactttgggaggccgaggcgggcggatcacccgaggtcagaagttcgagaccagcctggccaacatggcgaaaccctgtctcttctaaaaatacaaaaattagccagtcatggtggcacacgcctgtaatcccagctgctcaggaggctgaggcaggagaatcacttgaaccagggaggtggaggttgcagtgagccgagattgcgccattgcactccagcctgggcaacaagagccaagagtgaaactccatttcaggaaaaaaaaaaagagaaagaaatgcagaacccaggccccacccagctctgcccaatgagagtctgtatttgagcaaaatctgcgggtgatttggctcatttctggggcctccaagctccatgtgaggaaagagaaggaagcagttgagtgctggctgcaaaactgaagaaatgagtgaatcaatgacaatcctggttgccttgagccttgacccatccaaagaatctctcagaccagtacttctcaaactcacctacacaccagactcacctagggagattttaaaaatccttttgggccagacgtggtggctcatgcctgtaatcccagcactttgggaggccaaggcgggtggatcacttgaggtcaggatcgagaccagcccggccaacatggtgaaagcccgtctctactaagaaaaaatacaaaaattagccacgcatggtggtgtgcacctgtaatcccagctacttgggaggctgaggcacaagtattgcttgaacgcgggaggtggaggtttgcattgagccaagatcttgccactgcactccagtctgggtgacagagcaagactccgtctcagaaaaaaaaaaaaaaaaatccttttgtcctgattgtcacccctctttcatttaaatcagaattgtgggtcaggcatggtggctcacgcctgtaatcccagcactttgggaggctgaggctggtggatcacctgaagtcagaagtttgagaccagcctgaccaacatggtgaaaccctgtctctactaaaaatacaaaaattagccaggcgtgatggcgggcgcctgtagtcctggctacttggtaggtcgaggtgggagaatcacttaaacctgcgaggcggaggttgcagtgagcagagatcatgccattgcactccaacctgggcaacagagcaagactctgtctcagaaaaataaataataaataataaattaattaaataaataactcagaatcatggggctgaaggaggtggctcacatctgtaatcccagcaagttgggacaccaaggcaggcagatcacttgaagccaggcgttggagaccagcctggccaacacagtgaaaccctgtctctactaaaaatataaaaattagtcaggcatggtggcgcaagcctgtaatgccagctactccggaggctgaggcacgagaattgcttgaacctggggggaggcggaggttgcagtgactctgtctcaaaaaaaaaaaaaaaaaaaagagatgggggttctgttgtgttgcccagggtggtcttgaactcctgggctcaggagatccacctgccttggcttcccaaagtgttgggattacagacatgagccactgcacccggccaaccactgatctttctttctactacctccagagttttgccttttccagaatgtcctttagttggaatcatgcagtatgtacccctttcagactggcttctttcacttaggaatatgcatttaaggttcctccatgtcttttcatgtcttgatagctcactggataatatttctttcttttttctttttctttcttttttttttttttgaaatggactttgctcttgttacccaggctggagtgcaatggtttgatcttggctcactgcaacctctgcctcccaggttcaagtgattctcctgtgtcagcctcctaagcagctaggattacaagcatgtgccaccacgcctggctaattttttgtatttttagtagagatggggtttctccatgttggccaggctggtctcgaactcccgacctcaggtgatctgcccgccttggcctcccaaagtgttgggattacaggcgtgagccactgcacccggccaaatagtatttcatagtaaggatgtttcatggtttgtttatccactcactccctgcaggacatcttggttgcagttttaactttttttttttttttttgagacggagtcactctgttgccaggctggagtgcagtggtgtgatctcggctcactgcaacctccggctcactggttcaagcaattctcctgcctcagcctcctgagtagctaggattacaggtgcccgccaccatgcccagctaatttttgtgtttttagtagagacagggtttcaccatgttggccaggctagtcttgaactcctgacctcaagtgatccacccgcctcagcctcccaaagtgctgggattacaggtgtgagccaccacacccagacaagttttaacatttttcatatgctgttaggaccaaagaaaaccattctttgatccctgatttgagatctctggtttgaactacaagctttttgagggcaggaggctgttgactcctgctccaccttgtgagggagaggctgctatctccatttaacaggggaggaaactgaggcagaatgctgagctcaaaagctcaggaggagaagactggtcctagagtcactgagagactcggtcagtaccccatgcttcatacacctctgactgaatagcacagtgctagagtgccctggggacccttctagtaccacccagtcatctgcaaatgaggcattgacccctgaaaagggaaagtcacagagtccattgcagaccaggacttagggacccaaagctttttcctctcttctgaggcagagctgatttttttctgtttgtttatttatttatttatttttattttattattttatttttttgagacagagtttcgctattatcgcccaggttggagtgcagtggcgcgatctcagctcaccgcaacctccgcctcatgggttcaagcgattctcctgcctcagcctcccgagtagctgggactacaggtgcctgtcaccacgcccagctgatttttgtatttttaatagagatggggtttcattctattggccaggctgatctcgaattcctgaccttgtgatccacccgcctcggtctcccaaagtgctgggattacaggcatcagccactgcgcccggcctgttttttgtttttttttttttttgagacagagttttgctcctatttcccaggttggagtgcagtggcatgatctcgactcactgcaacctccgcctcccaggttcaagcgattctcctgcctcagctgccggagtagctgggattacaggcatgagctaccgtgcccagccgaggcagagctgatttttaaaaaatccatctactgaaatttccacccacaggtactttccatttccgcactgttccagaaatacctcttgcgtcgttgctaggcgctaagcaatctctttttcaccctcacaggcatctttggaaatgactgatatagatctggtgtggtcaccttgtccaggctttcccaagatgagcatcgaaagtcccatgtccagccgggtgcgggggctcatgcctgtaatcccagcactctgggaggccgaggaaggtggatcacctgaggtcaggagtttgagaccagcctggccaacatggagaaatcccatctctactaaaaatacaaaagttagccgggcctggtggcgggtgcctgtaatcccaggtactcgggaggctgaggcaggagaatcacttgaacccgggaggtggaggttgcatcaagccaagatcgcaccactacactccagcctgggcgacagagcaagaccccatctcaaaaaaagaataaaagaaagtcccatgtcccaggaaacccctgggacccaggcaaagggggatagttggtcaccctagaccgcctccccctcctacatatgggcaaactgaggcccagggaagggagggactagcctaagctcacccagtcagaggggaatgtgttcatggcatgcggcagttgaaaacctattggcttcatggggctgtcccaaacccatcaagagaaaccaaggagtatggaaaggggaaaggacctgggcttttttttttttttttttttttgaggcggagtctcactctgtcactcaggctggagtgcagtggcacgatcttggctcactgcaatttccgcctcctgggttcaagcaattctgcctcagcctcctgagtagctgggattatagccatccgccaccatacccagctaatttttgtatttttagtggagacggggtttcaccatgttggccaggctggtctcaaactcaaactcctgacctcaagtgatccacctgcctcggcctcccagaatgctgggattacaggtgtgagccactgcgcctggccgtcatcttggtcttttgacagtgaagcaaactaaggcttgggggggcaggcagtcacttgcccaaggccatgctagagtgagtagcagagccagaagctaggcatgtgatgaggttttgccatgttgcccaggctggtcttgaactcctgagctcaagtgatctgcctgccttggcctccgaaagtgctgggattacgggtgtgagccaccgcgcccagccggcatgtgacttttatagcagggcacacacatactgcaaacatgggcatctgcccgtcagagcgtaactcatgcaaacgctaggtccctacccccactccccaacctcggtccctgggatgatcccagagggcacaagaaagatcctggaaagaattcagtccctgggagttatttttagatgcagaggtatccatttctgcaaaacatgggtgcctcacccgacctggcctctgcacaggccaccagctgctctgagggattaactctcagccagttgtgttttaaatagaccctaggagaggagctgaagcattttacctcataccctaggaccttggtcaatggtaagacgtaggacaaccttgagagcagggagaagctgcattttgggctcataactccagggtgaggttagaggagggaaaagctcattccagtcctcatcaggagttagacaaagaagcaacgttctactttgttttttaaaaaaagagatgtggagagaaaaaagtggcttgttcaagatcacattgttagttggtggggatagcgaggagaggggcaagtgtattgattacttactctaaaacagggatgtccaatcttttggcttccctgggccatgtttgatgaagaattatcttgggcctcacataaaatacactcacactaacgatagctgatgagcttaaaaaaaaatcacaaaaaaacctcattttttttttttttttttttgaggcagagtcttgctctgtggcccaggctggagtgcagtggtgtgaccttggctcactgcaacctccacctcctgaattcaagtgattctcatgtctcagcttcccaagtagctgagattacaggcgcatgccaccacgcccggctactttttgtatttttagtagagatgggggtttcaccatgttggctaggctggtctcgaactcctgacctcaagtgatccacctgccttggcctcccaaagtgttgagattacaggtgtgagccactgagcccggccataagtgtatcattttgcagcccaaccttttcactcagcagtaagcttatgggacttgtctttgttgatacatctaaaacagagattctcaaccagaagggattctgttcccaaaggataaatttggcaatatctggagacattcttggttgtcacagctgtgtggtgccactgtcatctagtgggtggaagccagggatgctgcttaacatgctataatgcacagaatgcccccatagcaaaaaatgatctgatcccaaatgtcaacagagctgaggttgaaaaaccctgatcaaggtctagttcacttttctttttctttttgtttgtttgtttgtttgtttgtttctgagatggagcctccctctgtcgcccaggctggagtgcagtggcgcaatcttggctcactgcaacctccacctcccgggttcaagcgattctcctacctcagccccctgagtagctgggattacaggcacctgccaccatgcctggctaatttttgtatttttagtaaagacagcgtttcaccatgtcggccaggctggtctcaaactcctgacctcaagtgatccgcctgccttggcctcccaaagtgctgggtgagccactgcacccagcctggttcacttttaaatagctactctatggcactccacattttgtggcttcccacagctttactaagagactgttgatttcacttttctcctgttgcaacattgtatcagtgaaacatcttccttctctaagtctttgtttatggtgcttgtttctttggggttaatagcaaggagtggaattgctggggtccaggggatgcacagcttcatatttccctggtattgccaagttgcctctaacatggtaatgcccactgatgcgctcacctggatttgtaggagaaactctggcattgatgattatttccccctgtgaggttgaccaagctaagaagaacgtaattccttttacagagtagagtgcactacacctttctcaattaataaatggaacagagaaggtcattgttgttacaatgtcaccagaaatgcgcaggcctgctggtggctcacacctgaaatcccagcactttgggaggccaaggcaggaggatcatttgaagccaggagttcaagagcagcctgggccacacagtgagatcctatctttacaaaaaaagaaaaaaaaaaaagtataaaaattggccaggcatggtggcacacgtctgtactcctagctacttggaaggctcaagcccaggagtttgaggctgcagtgagctatgattgcatcactgcactccagcctgggtgacagagcgagatgctgtctcttaaaaaaagtgtccagggccaggcgctgtggttcatgcctgtaatcccagcactttgggaggccaaggtgggtggatcacctgaggtcaggagttcgagaccagtttggccaacttggagaaaccccctgtctactaaaactacaaaacttagctaggcgtggtggcaggtgcctgtaatcccagctacttgggaggctgaggcaggagaatcacttgaacctaggaggaggcggagattgcagtgagccgagatcacaccactgcactccagcctgggcgacagagcaaaactcttgtctccaaaaaaaaaaaaaaaaaaagttggggggatccaacacaaccatgatgactttatgtttgctagaatgtaaattccatgagggcagggacctcacctgtcttgttcattattgtaataccaggacccaaggccgggcgccgtggctcacacctataatcccagcactttgggaggctgaggtgggcagatcacctgaggtcgggagtttgagaccagcctgaccaacatggagaaaacttgtctctactaaaaatacaaaattagccgggcgtggtggtccatgcctgtaatcctagctagtcgggaggctgaggcaggaggattgcttaaacccaggaggcagaggttgcagtgagccaagatcgcgccattgaactccagcctgcgcaacaagagcgaaacaccgtctcaaacaaacaacaacaacaaaaaaaaaccaggacccagagggatgcacatttcccataaattcattcacagttatttcttgaacccatacaatgtgtccaacacagcccccattcagtggcagagaaggcctccgtggttgctgaactcacggagggatgaagatcaaatccacccgttgaatgtatcattagtatatacagatttcttaatctgttgcagatgctataatctgttgcagtggcaataaaccagtagaccaggtggctgataaacaacaaatttatttctcagagttctggaggctggaagtctgagatcagggcactaacatggtcaagttctaatgagggccctcttctggcttgcagatgatcaacctctccttgtgtcctcatatggtagacagcagagagcagcaggctttctcatgactcttatttgtttatttattgagatagagtcttgctctgtcacccaggctggagtgcagtgccttgatcacggctcactgcagcctcaaccttccaggctcaagtggtcctcccacctcagaagtagctgggaatacagacacctgccatcacgcccagctaatttttattgttgttgttgttttagagatgagatttcactatgttcccagggctggtctggaactcctaggctcaagagatcctctggcctcagcctcccaaagtgctgggattacaggtgtgagtcaccacgcctggcctctcttgactatttttttttttttttttttttagagacagagtctcactctgtcgcccaggctggagtgcaatggtgcaatctcagctcactgcaacctctgcctcccgggttgaagcgattctcctacctctgcctccctagtagctgggactacaggcgcctcccgcaacgcccagctaatttttgtatttctagtagagacagggtttcaccatattggccaggctggtctcgaactcctgaccttgtcatctgcccgcctcagcctcccaaagtgctgggatgacaggcgtgagccaccatttataaaggctctaaccccgttcgtgaggggtctaccctggtgacataatcacctcccaaaggcccgacctcctaatgctatcacaagcggggaggggtaggatttcaacatacgaattttggagagacagaaacattctgtccacaacagacactctttctcttccctgctaaaaatagacaaaactgattatttcttttgcttagtcttttgatttgactaataagagatcacattttggccgggcgcggtggctcacacctgtaatcccagcactttgtgaggccgaggcaggcggatcacgaggtcaggagattgagaccatcttggctaacacagtgaaaccccgtctctactaaaattacaaaaaattgggcgtgctggcgggtgcctgtagtcccagctactagggaggctgaggcaggagaatggcatgaacctgtgaggcggagcttgcagtgatctgagattgcgccactgcactccagcctgcgggacagagcgagactccatctcaaacaaaaaaagagagagattacattttgtgaccttgttatctcatgtcaatactgactgtagttttcatttcattagaataagttgtattaggggaatcgttggttttggctctggtcatgtaatgtacagagtagctgtaccttacaacttgatcataaagttgttctctgcaaaacgaaactagttgggaaagacagaatcaatatgatgaaagaagtggtcataccaggagacacaagttctaactccaaggtgtggccttagaagattacgaagatacaacataaggatagaactatttataaagattataaaggctttacatgagtaatacaagatgcaaggatttagtgaatagacattaatactgtaccccgagtgttgcattttcatgacctttttttttttttttttttttgagaggtagtctcgctgttgttggcctgggctggagggcaatggcacgatctcagctcactgcaacctctgcctcctaggttccagcaattctcttgactcagcctcccgagtagctgagattaaaggcgcccaccaccacgcctggctaatttttgtatttttagtagagatgaggtttcaccatgttggccaggctggtcttgaactcctgacctcaggtgatccacccacctcgccctcccaaagtgctgggattacaggcatgagccaccgtgcccagccctttttttaaaaagaaaaaaaaaaaaaaagcccagctataggacctaaggactcagcaatggggttttcaagcccccttctttttaatatggaattttaaaatacttcttatcttggaagagtttatgactcacaagaagttgcaaaaatggtacagagaatttgcaaataccctttacccagcttcctccaatgacatcttatgtaatgatagtgcattattaaaaccaggaaattggcatgggtacactatcattaactcaactacagactttatatatttattatttttgagacagagtctcattctgtcacccaggctggagtgcagtggtgcactcatggcttactgcagcctcaaactcttgggttcaagtgatcctcccaactcaacctcttgagtagctgggactacaggtgcatgccaccatgcccagctaattagaaaaaattttttgtagagatggggtctcactgtgttgcccaggctggcctcccctccccttccctcccttcccctcccctctcaacagggtcttgctctggagtgcagtggcatgctcatgactcactgcagcctccacctcaccagctcaagtgatcttcctacctcagcttcccgagtagctgggactacagaagcatgccaccacgcccagctaatttttaaaattttttgcagaggtggggtctcactatgttgcccatgttggtctcgaacacccaggctcaagtgatctacgtggctcagcctcccagagtgttgggattacaagtgtgagccaccgtgcccagcccggaaataaaagcttaatacatgctacaatggggatgaagcttgaggacattatgctcaataagccacacaaaacaacaaagtttgtatggtttcgcttacatgagattcctaaagtcatcaatttcatagagacagaaagtagaatggtgccaggggctaggcgatgggggatgaggagtgagtgtttaataggtttcagtttgggaagatgaaagagttttggagatggttggtggtgattatggcaaaacaatgtgaatataatgccatagaaccacacacttggccagccacttggcagtggctcatgcctgtaatcccagcactttgggaggccaaggtgggcagatcacaaggtcaagagattgagactatcctggccaacatggtgaacccccatctccactaaaaatacaaaaattagttgggcgtggtggcgcatgcctgtaatcccagctactcgggtggctgaggcaggagaatcacttgaacccgggaggaggaggttgcagtgagccgagatcgcgccaccgcgctccagcctggtgacagagtgagactctgtctcaaaaaaaaaaaaaaaaaaaaagagctatacacttaaaaatgtttaaaatgggctgggcatggtgtctcacgtctataatcccaactctttgggaagctgagccaggtggatggcttgagcccaggagtttgagaccagcctgggcaacatggcgaaaccccgtgcctactttaaatatacaaaaaattagcctggcatggtggcgcgcgtgcctgtagtcccaaatactttcgaggctgaggtgggaggagtgtttgagcccaggaagtcaaggctgcagtgagtcgtgattgcaccactgcgctccaggctgggtgatgggagtgaaaccctgtgtccaaaaaaaaaaaaaaaaaaaaaaagtaaagtgataaatttaatgtatattttacaaaaaaaaattctttttaagacagcaggtgtaagaataccagcataaggctgggcacggtgactcatgcctgtaatcccagcactttgggaggctgaggtgggaggttcacttgagtccaagagttggagaccagcttggccaacatggtgaaaccccttctctactgaaaatacaaaaattagccaggcatggtggtggctgcctgtgatcccagctactcgggagtctgaggcaggaggatcgcttgaacctgggaggcagaatttgcaatgagctgagattgcaccattgcactccagcctgggtgacagagtgacactctgtttgaaacaaacaaaaaaagttaaaaaaaaaaaaaaaaaagaataccagcataagctcatagggatcttgggatcagctgaggtcagaatagcaatttcttttgtttcgtgtgtgtgtgtgtgtgtgtgtgtgtgtgtgtgtgtgtgtgtgtgtatgtgtgtgttttagatggagtcttgctctgttgcccaggctggagtgcagtgcagtggtgcaatctcagctcactgcagcctccacctcctgagttcaagtgattctcctgtcagcctcctgagtagctgggattacaggcatgcactaccgttcccggctaatttttgtatttttagggacggggtttcaccatgttagccaggctggtcttgaactcctgacctcaagtgatttgtccaccttggactcccaaagtgctgggattacaggtgtgagccaccatgcccggcccagagtagcaatttcaaagtactcccaggtacaagctggcccgtctcaccaagcctcagtctcctcttgacaatgagactcctgataataaaagccatcacttggctgggacactgatgaggatttattaagtcctaaatgtgaactagtgtcatcatcattgccacctctctgggcatgaaggaaaggactcccactcggctctctattttctctgtgcaacctcaggcatgcgtacagcctctctgaaccttggttcctcctctgaaacttacaaactgcacagtgttgggtgggcgctctggattaggataggctgaccagagcatatgggagtgaagcctgcccttggcatgctggtgatgatgggggacactcctgtgcctcccaggagcagtcgaactgtcccggcgccaccccatcgcgtcctggctgtgcgccatgctgcattgcttcgggagctacatcctggctgatctgctccttggggagccactgatcgattacttcagcaacaactccagcatcctgctggcctcagctgtctggtaagccatgctgggcatgggagagcagagccgggtgggggaaacaacaacctgggcaccagggaggagagaggttggaggaattagaatgcaccagcaacagccctcatgatggccctgaatatgctgccctccatgcccatctctggtctaggcacagcacgttggggagggtggtctgatataaccacagctccctacccccatccttcacagtctgcccatcccctggcactcactgttctctccccaaaaggtacttgattttcttctgccccctggacctcttctacaagtgtgtctgcttcctgcctgtgaaactcatcttcgtggccatgaaggaggtggtgcgagtccgcaagatcgcggtgggcatccatcacgcccatcaccactaccaccacgggtggttcgtcatgattgcaactgggtgggtcaaaggtaaataggatgatgacaatgaaaaatcatcccagtggagaacttttggttcagtggtactaccaggcaccccagctaggaaagccattgctccaggcacaggggcataaagactgcagtaggtgttcaaacctccctacaggtatcagccgatacctttagggtaaatgggaagattcttctagaaatgttactgtcaggggtacctaagacagtgatgatgatgacaaaagccagcattgccagagcaggttttctcacttgcagcactactgacatgtggggctggatcattctttgtggtgggggctgccttgtgcactataggatgttgaacagcacccctggcctccacccacgagatgccagtagcacacttgtccccagctgtgacaaagaaattgtctccagacattgctaaacgcctcctagagggcaaaatggctgcaggtgagaaccccttcttctctagagctctagctataggagttcttaacttttgtggaccatggcccttttgccagtgaagcctacagaccctttcgtgtgcagaaaatagagctagacatggtggctcatgcctgtagttctagctactcaggaggctgaggtgggaggatcacttcagcctaggagttcaacattacagtgagctatgattgtgccactgcactccagctgggcaacagagcaagagtctgtctctaaaaaattaaaattaaaaaataaagtaataatgaaaatgttattagaaataaagaacgttttataatgataaaagggtcaatccaccaggaagatataacaactataaacatatatgcacctagaaacagagcaccaaaatacataaagcaaaaatggacagaagttaggggagaaagagataattcaacattaaaagttggagaagtgggccaaggagtaacaggaaagcagggaaagaaggcctgagcaagtgccaaaaaccattgggcactttatcctcgcttcctgcccaccagatatgggtacccacaaagtgccaagacctagaatcaccctccattgagccatggtgtcctcagttattccttgctatggggagccaacctgtgcattatacaatggtgagccacctccctggcctcgactcactaaataccagtagcgctccctccccagctgtgacaactcaaagtgtttctcaacattgccagatgcttccttgggggcaaaatggccccagatgcgattccctggtccagtagtacatctcaggcacccagttggtgcagcagttcctggagtggatgtccaagtctatttaaccagtacatttagggtaaatgggaagattcttccagaaatttaatcattctatctccatttgagtcttcttattgtctctccaggaagcttttagtactgagcagattccccaggggtatagcatctcctccagaggatgggtggcttgagaaagattaagaacttggagccttgaggaggagagagactgcgggtgggggctgccttggaagcctcatacacagcttggggtcctggattaggggcatcaggacagacaaccccaggttgaagacctgccttgcaggtggggacatgactgattcctttaggtggcttttgctctgaatttgccatatgatcctcagcaaggctctgtcctctctgagcctcagtttccccacctgcagctgatgatcatacacccccaggctcagtgtccttctagagaagattctgggagtggagagactgcttccttgggaattcaaacaagaggaaaggagacctgggggtggtgggcttgttcagaagcaccctgtcctgtaggttctggtgtcgccctcatgtccaactttgagcagctgctccgaggggtctggaagccagagaccaacgagatcctgcacatgtctttgtgagtatcccactccacctctccctccatgcctcctgtatgtccgggtgcctgaccctgagttggatgctgctgataacttagagaggcctcaacccttgactctgcctttcaggagctttcagaggctatgactggggaagctcaaagcagagccatagctctgctcagtgtggaggttggggagggcagagctgcaggaaggaggcaatacctgattggggttttgaagggtgagcaggagttcactggccaagaaggagcctcccaacagaggccagcatctctgccaactgtgaaatcacagaagagcagcagtgctgctgggtgtgcggggtcagggtacagggtatgcatgggatatggagtgtgcattgggagcatatctggagctaagtggacaaggccaggtgacagcatccaagacccaatgcaggatcccacactgcatttagcttaatgttttttatttttttattttttgagacagagtcttgctctgtcgcccaggcttgagtatgctggcatgatctcggctcactgcaacctccacctcccaggttcaagagattctcgtgcctcagcctcctgagtacctgggattacaggcatgtgccaccatgcccggctaatttttgtattttgagtagagatggggtttcaccatgttggtcaggctggtctggaactcctgacctcaagtgatctgccgacctcagcctcccaaaataccgggattacaggcatgagccaccctgccctggacagtttagtgcatttttaaaagaccttgttgggggctgggtgtggtggctcacacctgtaatctctgcactttgggaggccaagcctggaggtttgcttgagtccaggagttcaagacaagactgggcaacatagtgagacctattctatattaaaaaaaaaaagttaaattagctaggcatggtgggatgcacttgtggtcccagctactcaggaggctgaggcaagaggattacttgagcccaggaattcgaggcttcagtaagctaggatcatgccactgtactccagcttgggtggcagagcaagaccttgtctcaaaaaaaaaaaaaaaaaaaaaaagggatcatgcatttaaatcacctggccctggaacctggtgagtgctttggaaatattagagagaattatcatcattaggctgggcacggtggctcacgcctgtaatcccagcactttgggaggctgaggtgggcagatcacctgaggtcggcagtttgagaccagcctgaccaacatagagaaaccccatttctgctaaaaatacaaaattagctgggtgtggtggtgcatgcctgtaatcccagctacttgggaggctgaggcaggagaaccacttgaatctgggaggcggaggttgcagtgagccgagatcacgctattgcactccagcctgggcagcaagagcgaaattccatctcaaaaaaaaaaaattaactaggggtggtggcatgcctgtagtcccagctacatgggaggctgaggcaggagaaccggttgaacccgggaggcagaggttgctgtgatccgagatcctgccactgcacttcagcctgggcaatagagcaagactctgtctcaaagaaagaaacagagagagagagagagagaggaaggaaggattattaaatacatgcagtgaagctgggcatggtggcccacccctgtaatcccagctattcaggaagctgaggtagggggattgcttgaaaccaggaattcaagaccagcctgggcaacattacaacatcccatctctaaaaaaaaaaagaaaaaaaaaattagccaggtgtggtggtgtgtgcctgtagtcccagctactcaggacgctgaggcaggaagatcgcttggtctcagaaggttgaagctggagtgagctgtgatcacacaagtgtactccagcctgggcaacagagcgagaccttgtctcaaaaaaaaaaaagcaatgagagacagacatcaggaatagaagtcacaggtctgtcttttgcaacaaataaaaatatcttaaacctattttgcaaggaaaaaaataaaagttaaggaaaactctgcatgttgtaatcacattttctgggggaaataagctgatgggggatccccaagatcatcctgatgttccatgatttgctagaaggactcagagaacttagcaaagccattatattcagggttatgatttattacagtgacaagatatagaataaaatcagcagaggcagctcacacctgtaatcccagcactgtgggaggccgagataggaggattgctcaaggccaggagttcaagaccagcctatgcaatagaacaagactccatctctacaaaaaaaaaaaaaaaacttaaaaattaagcaggcacagtggcacataactctagccctagctacttggggggctgaggtgggagaatcacttgagcctcagagtttgaagttacagtgagccatgatcagaccactgcactccagcctgggtgatagagagagaccctgtctctataaataaataaataaataaataaataaataaataaaacgaaatcagcaggggttggctgggcgtggtagctcatgcctgtaatcccagcactttgggaggctgaggcgggtggattatttgaggtcaggagttcaaaaccagcccggccgacatggcgaaaccccatctctagtaaaaatacaaaaatcagctggcgtggtggcgggcatctgtaatcccagctactcgggaggctgaggcaggaaaatcacttgaacccaggaggtggaggttgcagggagctgagatcatgccactgcattccagcctgggtgacagagtgagactctgactcatacacaaacaagaaatcagcaggggcaaaatgtgcatgaggcagagtacaggaaagaaaaggtgaaaatatccagttttcctctcccagtggaatcacgtggacagggcttcattctcccagcagcaatgtgtgacaacatgcatggtgtactgccaaccagggaagctcttctgagcctgggtatccaggatttttattgtggctcagaactagctaaccacctgtgtggctgacctcagtcttcagcccctctagaggtccacctgatgctgcatggcccaagacccccaccataaattacgttgttactacctggtgtggcccaaggccgtcctcaggcaaacaaagacagtcttatcaaggcaggacactccaagggcttagagggcatattccaggagctggacaaaggccagatctttccttggaccaggttaacccatcatgcataggatgacaccatctcaacctgccaccttacaatcaggagaagctgtggctgggcgcagtggctcatgcctataatcccagcactttgggaggccgagcagatcacttgaggccaggagttcgagaccaacctggccaacatggtgaaacactgtctctcctaaaaatacaaaaattagccaggcatggtggcatatgcctgtaatcccagctacttgggaggctgaggtgggagaaacacttgaaacaaggaggtggaggttgcagtgagccgaggttgtgccactgcactccagcctgggcaacagagtgagattccatctcaaaaggaaaagaaaagagagaagctgggatgggagctggtgccagggcaggggggtgtctgggccagagttatgaagacttgagccatgcaggcacctcccggtaatgacagctgctccctccagccccaccaaggccagcctgtatggagccatcctcttcaccctccagcagacccgctggctcccagtgtccaaagccagcctcatcttcatcttcaccttgttcatggtgtcctgtaaggtaagcctttctcttcttgcagcgttcttgccttgaccaatgccaccctgccacctccaggttgggagtggggaaattggacactcccagccttatgtggctgggacaggcagcccagagaggggagatgcttgccagtaggtcactgggaagagagtttaaaaggcagtgtccagcagccaggacacagatgagaggaacaggccttctgtgtaaaggacccagcctgagccagggtcaaggtgggcccactctcttgggtacagagaccagagggacaagaagctgaaatggcagcatcaggtagccaggaactcagttggaccaggaatacttctagtctgacagtcatgccttgagttgacatcaccccacccaggaggggtcttcaggggctgggctctctccctctgcatgaagatcttagctcagggctgtgtcttccctgggcgaggactccagggctgtcaaaagggagtgagcatgtcttcctgcattaggtgagaagggagaggcaagcagatggctgggatcctgtcctgctatgtttgtagctctaccccaggccaaatgtcttagtccattcaggctgctgtataacagaatgcagtaccatagactgggtggcttagaaacaacagaaatttattcctgggcaggcacgggggctcatgccaacacttcagggggccaaggcaggcagatcacttgaggccaggagttcaagaccagcctgggcaacatggcgaaaccccatctctcctaaaaatacaaaaattagccaggcgtggggtcacatgcctgtaatcccagctactcgggaggctgaggcaggagaatcgcttgaacccgggaggtggaggttgcagtgagctaagatcgcaccaccgcactccagcctgggcaacaaattgagactctgtctcaaaaacaaacaaacaggcaaacaaaatacaaatacaaaaattaaccaggcgtggtggcgcatgcctgtaatcccagctacttggatggctgaggcatgagaattgcttgaacccaggaggtggaggctgcagtgacctgagatcatgccattgcactccagtttgggcaacagagtgagaccctgtctccaaaaaaaggaaaaggaagaaatgtatttcttacagttctggaggctgggaagtccaagatcagggtactagcctggtcgggttctggtgagggccctctttactggttgcagataggcagcatctcactgtgtcctcgaatggtggaagggactggttagctctcctgggcctctttataagggcactaatgtctttcctgagggctccacccttatgatctaattacccctccaaaggccttacctcctaataccatcacctttgtgataggtttcaacatatgaatttgggaggacacagaccttcagacctgcacttagcacagcttttctctgagcccaggtgtcgtggggaattctgggggatgggtgaccagcagtctcagtgtgcttggaactttccaggggtcaacacttgaaatctggcatcctgggaaacctgagatggtcgcccatcatcctgggggtgcatgcagccagagggctgggtctgggctacctccaaccttgactttgatgacattctctcccctcttctccccaccctgccctccactcctttgctttctaccttggtctccctctgtctctctcgctgtctccctggccaccccacctcaggtgtttctgacagccacccactcacacagctccccctttgatgccctggagggctacatctgccccgtgctgtttggttcggcctgcgggggtgaccatcaccacgacaaccatggtgggtcccacagcggtggtgggccaggagctcagcattcggccatgcccgccaagtccaaggaggagttgagcgagggctccaggaagaagaaggccaagaaggcggattagggggtggcccaaggggcaccggggagaggacccggacccaggaccctctgagctgggaggcttcctgcgctcagatctatcctttcctggccttgacttccccatctgcaaatcagggtcattggctcaccctccagggctgacgtgggggttgagatatggggatgaggatgaagaacttttgtagaaatcggggttccctctttctctctgccaggaccccatagagtcacagcttttggaggggttcacagaatcctggcagcagctccagtcaagaatgtcactggttggcatgatattcttagttctatttttccttctttaaaattgcatcttgaccaggcacagtggctcatgcctataatcctagcactttgggaggccgaggcgggcagatcacctgaggtcaggagttcaagaccagcttggccaacatggtgaaaccccatctctaccaaaaatacaaaaattagccagacgtggtggtgcacgcctttaatcccagctactcgggaggctgaggcaggagaatcacatgaatccaggaggtggaggttgcagtgagctgagatcttcccactgcactccagcctggccaataagacctgtctccagcaagaccctgtctcaaaaaaaaaaaaaaaaaattgcatattgactcctgaagaacttcaagccatgttgagatccattcatttgatggacattttctaagtacctgtgagccaggtgctgccatttcaaagtctcttcttaccacgctcctcagtggctagacattttcacgtggccagaaagtcccgactcttgctgggcgtccctggacaagttgccttcctcctctgagcttggcgctccccatctgtatagtggagacccttggcccccctctgtacggaagggccgatgcgaagctgcagttaaaaaaggctcacatgctcctagcctcgtgcagtcaggaggggagaccaggacagttggaaattatgattgcaaatggctttgcattttagatcattcgtgtgtgtggatcagagaaacgcacaagttccctggcacaaaggaagccctcagtagacacgtctagggcaggcttgagagatcagatggcgtgaaaggcttgtgatctgttcgtctcaggctccccctaaaccaaagaaatggaaacagctggttggggttccacgatccagctctatcaaggggctctgagtgtgcacagttgggacctggatgtatcaggtctccctcaggctggagtccactggcactcattcagccattgaacaaacatacagatgcttacctgctctgtggtcagccttgtgctgctgctgggcgggccaggagcctgcttcagtgtgagcgaggtggatgatattatagctgaagggtccctcctggtcaccctcatctcagcctaggtcaccaggatgtctgagaggggtgggtgcatgggacgggcgtggccagtctcaggtgaggtttgggcccagacctcgttggagtcccagacgttgccaggctgttggaaaattgccttgttcctgtgatgcctgggagttaggtgggtcctggggaggtttcatcctcttgcttgtccacctcagctcggtgtggaggggcagccaataaatcattgtgaatgaaccctcatggcttgtctgatttatgcctgggattttgttttttgtttttgtttttgtttgagaccgagtctcactcttgcccaggctggagtgcagtggcccgatcttggctccctgcaacctccacctcccgggttcaagcaattctcctgcctcagcctcccgagtagctgggataataggtgcccgccatcacacctggctaatttttgtatttttagtaaaagcggggtttcaccatgttgccatgctggtcttgaactcctgacctcaaatgatccacccacctcggcctcccaaagtgctgggattacaggtgtgagccactgagcccagccacatgcctgggattttggcctcaagatgtggggatggctgggcatggtggctcatccctgtaatctcagcactttggagggctgaagcgggcagatcacctgaggtcaggagttcaagaccagcctggccaacatggtgaaaccctgcctctactaaaactacaaaaattagtcaggtgtggtggcaggtgcctgtaatcccagctactcgggaggctgaagcaggagaatcgcttgaacctgggaggtggaggttgccgtgagctgaggtggagacattgcactccagcctggacaacaagagcaaaactcattctttaaaaaaaaaaaaaaaaaaaaaaaaaaaaaggctgggcatggtggctcacacctgtaatcccagcactttgggaggccaaggcagatggatcacgaggtcggtggatcacgagttcagtagatcaagaccatcctggctaacatggtgaaaccccatctctactaaaaatacaaaaaatcagctggatgtggtggcgggcgcctgtagtcccagctacttgggaggctgaggcaggagaatggcgtgaacctgggaggcagagcttgcagtgagcggagatcgcgccacagcactccagcctggcagacagagcgagactccatctcaaaaaaaaaaaaaatgtatactgtgtacagtatacattacatacattatatgaaatcctagaaaaagcaaactaatgtataattacagaaagctgatcagtgggtgcttggggaaaggcaggtagggtggggtgggcaggagggattttgaaggggcaaggggacatgagtgatgagtctgttaacttctttgattgtgctagtttctcgggtctatacacatgtcagaacctattacattgtacattgcaaatacacacagtacctcatttgtcagtgatgcctcaataaagctgtaaaaaagaacccttcaattataagggaaaaaagtgcgagcttggtggctcacgcctgtaatcccagcactttgggaggctgaggcaggaggatcactggagcccaggagttggtgatcagcctgcacaacatagtgagactctgtctctacaaaaaaaaatttaaaaattagccgggggtggtgactcgtgcctgtaggcccaggcactctggaggttgagtggggaaaatcacttcagcccaggaggttgaggctgcagtgagctaagattgggccactgcacttcagcctgggcggaacagtgagaccctgtctcaaataaataaataaaataagaataaagtagaaaaaaactccacaccaaattgggcaaaagaagctgggcatggtgactcacatctgtagtcctagctactctggagaccaaggcaggaggatcacttgagcccattaggtggtgtccaacctgggcaacatagcaagaccctgtctcaaaaaaaaactgggcaaaagatttgaatagacaccaccaaagaaattatatggttggcagatatcatataaattgcacattaaaaccacaagcatatgccactgcatacctgttatgaattgaattgggttcctctcaaattcatttgttgaagtcttaacccctaaggtattagggggtgggacccttgggagatgattaggtcatgagggtggggctctcataatgggattagtgcccttacagaagaggccccaaagaaacactttgctcttcctaccatgtgaggacacagagagaagacacgtatgaaccaggaagccggcccttaccacacagtgaatctgccagtatcttgatcatgaacttcccagcctccagaactgtgagaaataaatttccgttgtttataagccaccattttctagtattttcttgtagcaccctaaatggactaagacaggagataaggcctttttttttttttcttttggagatggagtttccctcttgttgcccaggctggagtgcagtggcgccatctcagctcactgcaatccctgcctcccaggttcgatcgattctcctgcctcagcctctgggattacaggcatgtgccaccacgcccagctaattttttgtatttttagtagagacagggtttcaccatgttggccaggctggtctggaactcctgacctcaggtaatccacctgcctcggcctcccaaagtgctgggattacaggggtgagccaccgcacccggcctaatttttttgtagagttgggatctccctatgttacccaggctggtctccagcttctggctcaagtgatcctcttgccttggcctcccaaagtgctgggattacaagcatgagccactgctccccgccaccttttagaatggataaaataaaaataaccgacaatatccagtgtaggtaaggatttgggggcagctggaactcacacactgctggtgggagacaattggacagtttcttttaaggttttttatgtttttaaaatttttaattttttacatttttttttgagacagggtattgctctgtcgcccaagctggaatgcagtggctcaatcttggctcactgtaacctccgcctcctgggttcaagcgatccttccacatcagccccctgagtagctgggactacaggtgcatgccaccatgcctggcaaagttttgtattttttgtagagtcggagtcgtgctctgttgcccacactggccttgaactcttgggctcaagcaatcctcctgcctcagcctcccaaaatgctgggattacaggcgtgagccaccatgcccagtcagatacacatcttcagccatgagaagaatgcaaatcaaaaccacaatgagttgtcacttcacatccaacaaaatggctaaaattaaaatgacaatatggtcattttagtgctggtgaggatgtggagcaataggaactctcatatgctttggtaggaaggtaaaaaggtgcaaccactttggaagacaatttggcaggtttttttataagttaaacatagaagccaggtgcaatcgcttacgtctgtaatcccagcactttgggaggccaaggtgggcagatcacttgagttcaggagttcgagaccagcctggtcaatgttgtgaaaccctgtctctgctacaaatacaaaaaattagccaggcgtggtggtgtgcacctataatcccagctacttgaaggctgaggcgggaggagcccttgaacctgggattgggaggttgcagtgagctgagattgcactgctgcactccagcctgggtgacagagcaagattctatctccaaaaacaaacaaacaaacaaacaaacaaaacaaaacaaaacaaaacaaaacaaaaaacaaaatgttagcctggcacagtggctcacccctgtaatcccagcactttgggaggccgaggtgggcagatcacttgagatcaggagttcgagatcagcctgaccaacatggtgaaaccccaacatggtgtaattttgtaaaaatacaaaaattagccaggcatggtggcacctgcctgtaatcccagctattcaggaggctaagacgggagaatcacttgaacccaggaggcagaggttgcagtgagctgagattgcgccactgcactccagcctgggtgacagagcaagactccgtctcaaaaaaaaaaaaaccaacaaaacaaaaacactataagttaaacatagggtggtcatcggtgactcacacctataatcccagggctttgggaggtgcaggacggaggactgttttagcccaggaggttgaggctgcagtgagctgtgatggtgccactgtactgaagcatgggtgacagagcaagactctgtctttaaaaaaacaaaaaaacaaaaatatgaataaatgaacagctgtgctccgcccatagtattgcctactgttcagcgaaaaaaaaaaaaaggcggtggaggtggtgaacatgcaaaaacatgaatgagtctcgaatgtatccagattggtgggaaaaagccatacaaaaaagaatgtgtaatataggcatccatttatctgaaatcctagaaaaagcaaactattgtaacagaaagctgatcagcatgtggttggggaaagaaggacagggtagggcaggtgagaggaattttgcagtggcaccaggaaactcgggtgatggatctgctgatggctttgattgtgctggtttcttgggtctatacccatgtctgaatctattaaattttacttttgggtttttgttttgttttgttttttgagatggcgtcttgctctgtcacccaggctggagtgtggtggcacgatctcggctcactgcaacctctgcctcctgggttcaagtgattctcctgcctcagcctcctgagtagctgggattacaggtgcccaccgccatacctggctaatttttgtatttttagcagagacagggtttcaccatgttggccaagctcgtctcaaactcctaacctcaggtgatctgcccgcctcggcttcccaaagtgctgggattacaggcgtgggccaccgtgcctgtgcctggtctaaattttgctttgattacttaagatttaaaaaaaaattaacttttttcttatttatttatttagagagacagagtctcgctctgtcgcccaggctggagggcagtggtgcaatcttggctcactgtaacctctgcctcctgggttcaagcaattctcctgcctcaacctccagagtagctgggattacaggtgcccaccaccacgcctggctaatttttgtatttttagtagagacggttttgccatattggcccggctggtctcgaactccttgcctcaaatgacccacctgcctcagcctcccaaagtgctgggattacaggcttgagccaccacgccggcctcttttttatttatttttaattaattattttttacttctttttttcccactcattcaacctaagtacttaaaagttttcattttatatatgcatagttcatctatcagttatgcctcagtaaagctataaaaaaagaagctttcaattataaggaaaaaaagtctgggcatggtggctcatgcctgtaatccccgcactttgggaggccgaggccaaaggatcacttgagctgaggagttcatgaccagcctggccaacacagtgagacccagtctctgcagaaaaaaaaaaaaaaaaaattagccagttgtggtgatgtgagcctgtaatcccagctactcaggaggcagaggtgggaggatcgcttgagcccaggagttcgaggctgcaatgagctgagattgcaccactgcactccagcgtggatgacagagtgagaccctgtctcataaataaatgaataggctgcagtaacatactccagacagagtcgcttaagccacagacatttatttttccctaattcttgagggtggaagtttgacatcaaggtgtcagttggttttgtttctcaaggcctctctgcttgggtggcagacggccgccttctctgtcctcgtatagtcttccctcttcgtatgtctgtatcctagtctcctctgcctatgaggacaccagtgaattagatcagggcccacctatagactttttttaaaacttaattatctttttttttttttttgagatggagtctggctttgtggcctaggctggcgtgcagtggcgccatctcggctcactgcaacctccacttcccgggttcaagtgattctcatgcctcagcctcccgagtagctgggattacaggcacgtgccaccatgcctggctaatttttgtatttttagtagagatggagtttcaccacgttggccaggctggtcttaaactcttgatctcaagtgatccacccacctcagcctcccaaagtgctgggattacaggcatgtgagccaccctgcttgactgactattttaacttaattgtctctttaaagaccttatctcaatcagtttggtgctaaaaaaatttaaaaaaaaaagaccttatctcctgttttagtcctttcagtgtgctacaacaaaatactataaactggtggcttgtaaacaacagaaatttatttttcatggttctggaggctgggaagttcaagatcaaaatgctggcagattcactgtctggtaagggctggctatctggttcacagatggtgtcttcttttggtgtccccacatggtagaaagatcaaggagtttcttgggggcctcttgtggaagggcactaatcccattatgagggccacatcctcatgacctaatcacctcccaagggccccacctcctaataccatcaccttggggctaattttggactcaggtgatcttcctaccttggtctcccaaaacaaagggatgtgagtctctgtgtccagcgtcctttaaggatggattaaattaaagtaactgacaatgcctggtgcaggtaaagatttgggggcagctggagctcgcacactgctggtgggagacaattggacagtttcttttaaatttatttatttatgtatttatttgagatagggtatcactctgtcatccaggctggagtccagtggtgcagtcataggtcacttcagcctcgacctcctgggctcatgtgatcctcccgcctcagccgcttgagtagctgggactacaggcacacatcaccacatccagataatttttgtattttttatatagatgatgtctcgccctgttgcccaggctggtctgaaactcctgggctcaagtgatcctcctgcctcagcctcccaaagtgctgagattacaggtgtgagccaccttgcccagactgatagtttcttattaaattatacatcacttaccctataaacacaacaatccctgatagtttcttattaaattaaacatcacttaccctataaacacaacagtcccattgtggtgaaacaaaaattcacctattttttttttttggtaatcaccaaaaactgggaacatcccaaatgtccatcagttggtaagcggatgagccacctggtttatgcatatgatggaacattatacagcaatgaaaaggagtgaccttctacagcagtgtggttgaatctcaaatgcatttgctaaatgaaagaatccagacccaagagactgtgtgctcccattggcgggacattttatctttagagatggggtattgctttgtcacccaggctggagtgcagtggcaggaacatggatcattacagcctcaaattcccaggctcaagggatcctcccgcctcaccctcctgagtggcagggattgcaggtgcgtgccacatactcggctgtaggtcattttagaaatacaaaattttgggctaggtgcagtggctcacacctgtaatcccagcactttgggaggccgaggtgggtggatcatttgaggtcaggagtttgagaccagcctgaaaccctgcctctactaaaaatacaaaaattagctgggggtggcaggtgcctgtagtcccagctactcaggaggctgaggcaggagaattgcttgaacccaggaggcagaggttgcagtgagctgagatcgtgcaccactgcactccagcctgggtgacagagcgagactccgtctcaaaaaaaaaaaaaaaagaaaaggaaagacaaaattttaagtatagaaaacagatcagtggctgccaggaattgagatggaaggagagattatccacaagagagacagaggaattttgggagggaagggactgttctgcatttttaacgtggcagtagttacacaactgtatatgtttgtataaacttgcagaattcgcccggcagcgtagcccttttgggaggctgaggtgggaggatcacctgaggccaggactttgagactagcctgggtatcatggtgaaaccccatttctgcaaaaaatacaaaaattagccgggcatggtggcatgtgcctgtagtcctagctactcaggaggctgatgtgggagaatcacttgagcctgggaggcagaggttgcagtgagccgaaattgcaccactgcactgcagcctgggcaacagagccagacctgtctcaaaacaacaaacaaaaaaacaaacaacaaacaaaacaaaaaacccacaaagaaacactacaaaaaaaaccttgcagaattttgtggctaaattctaccttaatctaaaaagaaaaggaaaaagagagcagcctttggggtttcccaaatctgttcaaatcctgtctttgtttttttttttttttttttttttgacagattctcactctgttgcccaagctggagtgcagtggtgccatcttggctcactgcaacctccgcctctcgggttcaagtgattctcctgccacagcatcccgtgtagctgggattgcaggcaagagccaccatgcctggctaatttttgtatttttagtagagtcagggtttcaacatgttggccagggtggtcttgaacttctgacctcaagtgatcctacccgcctcggtctcccaaagtgctgggattacaggtgttagccaccatgcctggccaaaccctggcttttaatctccgagatacgtagcttgggcaagtaactccccttctctgagcctcaatttcctcttaggatggctaggaggagtgactggaaagtccttggcacaaagtgaggtctggagttgggacaaaagctgcctctgtcaaagtgctcacagaacccctggtcgggttcatttagcatctggtgggtgttggagataagtcggctccctgccttctggcactaatgttctgagatctcattttccaagagaacagattgtaccaaaatagcctcccagcctagtctgcgaagggggtgtgcaagccactggccaggtggagaatgattggcggggcaggctggggctgttgtcccagtgtgggtgtgagaacttggaggatcggctctcaaagtccaggctaatttggctgcaagttacactcagtaacttccttggtcttggaatgagagaaagtttctttttatcctttttaaaaaaaattgtggtaaaatacacaacataaaacttatcatcttttttttgtttgtttgagacagggtcttgctctattgcccaggctgaagtgcagtggcacaatcacagctcactgcagccttgacctcctgggctcaatccatcctcccacctcagcctcccaagtagctgggactacaggtgtgcaccaccatgcctggctaatttttttgtatttttagtagacaccgggtttcaccatgttgcccaggctggtctcaagctcctgagctcaagcaatccacccaccttggcttctcaaagtgctgggattacaggcatgagccaccacacatgtcctaaatttcttagccacatttgagtgtatacttcaggggcattaagtatattcacattggctaggcatggtggcccatgcctgtaatcccagcactttgggaggccaaggcgggtggatcacttgaggtcaggagttcaagaccagcctggccaatatggtgaaaccccatctctactaaaaatacaaaaattagctgggcgcagtggcacgcacttgtaatctcagctactcaggaggctgaggcaggagaatcacttaaacccaggaggcggagtttgcagtgagccca

SEQ ID NO: 2108 - DNA, 2626 bp, Homo sapiens
agctgcgggggcgcagtcgccgggccgcgggcggcgggacggacgaggccggggccccgggtggcacccggcaggcgggcaggcgggcgccatggagctgctctcggcgctgagcctgggcgaactggcgctcagcttctcgcgggtgccgctcttccccgtcttcgacctcagttacttcatcgtctccatcctctacctcaagtatgagccaggagcagtcgaactgtcccggcgccaccccatcgcgtcctggctgtgcgccatgctgcattgcttcgggagctacatcctggctgatctgctccttggggagccactgatcgattacttcagcaacaactccagcatcctgctggcctcagctgtctggtacttgattttcttctgccccctggacctcttctacaagtgtgtctgcttcctgcctgtgaaactcatcttcgtggccatgaaggaggtggtgcgagtccgcaagatcgcggtgggcatccatcacgcccatcaccactaccaccacgggtggttcgtcatgattgcaactgggtgggtcaaaggttctggtgtcgccctcatgtccaactttgagcagctgctccgaggggtctggaagccagagaccaacgagatcctgcacatgtctttccccaccaaggccagcctgtatggagccatcctcttcaccctccagcagacccgctggctcccagtgtccaaagccagcctcatcttcatcttcaccttgttcatggtgtcctgtaaggtgtttctgacagccacccactcacacagctccccctttgatgccctggagggctacatctgccccgtgctgtttggttcggcctgcgggggtgaccatcaccacgacaaccatggtgggtcccacagcggtggtgggccaggagctcagcattcggccatgcccgccaagtccaaggaggagttgagcgagggctccaggaagaagaaggccaagaaggcggattagggggtggcccaaggggcaccggggagaggacccggacccaggaccctctgagctgggaggcttcctgcgctcagatctatcctttcctggccttgacttccccatctgcaaatcagggtcattggctcaccctccagggctgacgtgggggttgagatatggggatgaggatgaagaacttttgtagaaatcggggttccctctttctctctgccaggaccccatagagtcacagcttttggaggggttcacagaatcctggcagcagctccagtcaagaatgtcactggttggcatgatattcttagttctatttttccttctttaaaattgcatcttgaccaggcacagtggctcatgcctataatcctagcactttgggaggccgaggcgggcagatcacctgaggtcaggagttcaagaccagcttggccaacatggtgaaaccccatctctaccaaaaatacaaaaattagccagacgtggtggtgcacgcctttaatcccagctactcgggaggctgaggcaggagaatcacatgaatccaggaggtggaggttgcagtgagctgagatcttcccactgcactccagcctggccaataagacctgtctccagcaagaccctgtctcaaaaaaaaaaaaaaaaaattgcatattgactcctgaagaacttcaagccatgttgagatccattcatttgatggacattttctaagtacctgtgagccaggtgctgccatttcaaagtctcttcttaccacgctcctcagtggctagacattttcacgtggccagaaagtcccgactcttgctgggcgtccctggacaagttgccttcctcctctgagcttggcgctccccatctgtatagtggagacccttggcccccctctgtacggaagggccgatgcgaagctgcagttaaaaaaggctcacatgctcctagcctcgtgcagtcaggaggggagaccaggacagttggaaattatgattgcaaatggctttgcattttagatcattcgtgtgtgtggatcagagaaacgcacaagttccctggcacaaaggaagccctcagtagacacgtctagggcaggcttgagagatcagatggcgtgaaaggcttgtgatctgttcgtctcaggctccccctaaaccaaagaaatggaaacagctggttggggttccacgatccagctctatcaaggggctctgagtgtgcacagttgggacctggatgtatcaggtctccctcaggctggagtccactggcactcattcagccattgaacaaacatacagatgcttacctgctctgtggtcagccttgtgctgctgctgggcgggccaggagcctgcttcagtgtgagcgaggtggatgatattatagctgaagggtccctcctggtcaccctcatctcagcctaggtcaccaggatgtctgagaggggtgggtgcatgggacgggcgtggccagtctcaggtgaggtttgggcccagacctcgttggagtcccagacgttgccaggctgttggaaaattgccttgttcctgtgatgcctgggagttaggtgggtcctggggaggtttcatcctcttgcttgtccacctcagctcggtgtggaggggcagccaa

SEQ ID NO: 2109 - protein, 297 aa, Homo sapiens
MELLSALSLGELALSFSRVPLFPVFDLSYFIVSILYLKYEPGAVELSRRHPIASWLCAMLHCFGSYILADLLLGEPLIDYFSNNSSILLASAVWYLIFFCPLDLFYKCVCFLPVKLIFVAMKEVVRVRKIAVGIHHAHHHYHHGWFVMIATGWVKGSGVMSNFEQLLRGVWKPETNEILHMSFPTKASLYGAILFTLQQTRWLPVSKASLIFIFTLFMVSCKVFLTATHSHSSPFDALEGYICPVLFGSACGGDHHHDNHGGSHSGGGPGAQHSAMPAKSKEELSEGSRKKKAKKAD

SEQ ID NO: 2110 - DNA, 289314 bp, Mus musculus
  misc_feature (1)...(289314): n = A, C, G or T/U
ttctgaagcaaggacatggaaatgatatcacccttaccaacagtgctccttacagagtctttcagcaacacaggagttctggtagctcaggttggtcatggaaggaaaacagacatcaacataaactgcaatgactacagaagtattcctctaccgcacccaggagctgattgcaggtgtgagtgttaccgaaggaccagagagcagcatggccctcaagtgacagtatcaggaacgagaatccagaatgagtttacaggtatggaaaatgaaaaaacaagacaacaaaacaagcaaacaaacaaacaaaacaaaaatcccaacagtgaccagaaagtatgccgccaaggtcatttttgtttgtttgcttgttttattttgaaacagtgtttctctgtgtagccttggctattttagagctagctttgtagaccaggctggcctctaagtcacagaaatcacctgcctctgcctcctgagtgctgagaataaaggtatatgccaccaccatatccacaaaacaaattttactcatactgtacggacacactagctgagaaaacggatcctggtggaaatgaggctgctgttgggaagtgggaaggaagtggagtgcacagcagatgccggttaaggtcacagcatgaaaaagagtgaggagattaggggaaagatgctataatgctaaacaaaaccaaccaaacaaccaaaccagaaaggagtgccagggccataactaacagaaacacttctggggggacaggatctctatgtagaccaggctgtctcagaactcagagagattcttttgttctgcctcccaagtgctgggattaaaggtgtggggaccaccatgaatggcctcttcttagctgttctcttctcattaacctcctttaagtggaagagagtcaagaggaatggtcagaaggaagcttaaactcaagaaatgaaagaaacagaagatctgtgctaaaaacaaaaataaagacacaaaacaactttgctattttgagtttggttctggacctggacaaatggcatcctaaagtacttaaacaacttgggttgcagtcatgtaataacatccataagttcaggaaacattttttggacaaaatgtctgtctcaatttatcaagaattactgctgtcaaagtaaccttacataaatataggttataaaaacttaacaaattcaacacttaagaagtcggcactcagtcaactttaggtctgctcctcagggacgtctctttcactagcattatacagggatacttccatatcattaaatattttcctacattgtaatttaaaatatctccatagcactcagttacatgactatatactaagtcacgtgactggtccattgcggtcaagttcagtctttaaagctttggctttaaaaaaatcattctgagactcaggcacggcaagacacacctgacctgcacactcctgaggctaccgccgcagggggatttcaagctgcaggccggcatctgctccagcgtgacagctgtctcaaaaccaagagcagctgccaagtgtcggagtctcactgtaattatgatcatttttacaattttttttgcttgcttttatttttcaagatggggtttctctgtgtggccctgactgtcctggaactcactgtgtagaccaagctggcatcaaaaaaatcacaaaaatccaccagcctctgcctcctgagtgtcgggattaaaggtgtgtgtcatcattgccaggatatatacatatatatttttttaattagaaaatttctcagatgaatgagccagagaatgcaagtcttcatgtcaacatcacccaagtatttccagtatgttttcgcaacgtatgactattttcccctgctctgactgctactatatttcatcggaagcttaaaaaaaaagtgataaagtagatggaacacaccatttgtcatttgaaatacattccagtacagaactcttgaaggcagtaaatagaatcatcatgttgggcagtcaccaccatttccagttctagaactttccactgtcccaatctggaactccatgtccacaaaataaagaaagaaattccattcttcttctagttttccaagctcctcattggctcctgctcctcagggacgtctctttcacagtctttgttttagaaacatttgtttttatttatggtgtgtgtgtggtgtgtgtgtgtatgtgtgtgtgtgtatgtgtgtgcgtggcgtgccagcagaggccacaagaaggctctggaaccactggagctgtacttgcaggacactgaatcacctgatattggagctgagccttaacttaggtcctttgtgagagcagccacagctcttaactgctgagctatctctccagctgttttggaattttggagacaaggttttctgtagcttaggcttgctatatagctgaggtcacccctggagtgctgggactgtcgggatgggacactatgtgtggccttcgtgctgttcttggaagtatatggtgtgttccttggttctcagaagggtgggcatacagagtgcagtcattcttggttgttttcagtcatctgtgccaactccgtacatgtggctcatactgctgggtaagttggaaagcacactcaggtccagcaaaccttcccaagcttggtctcgctatatttatgttatataacacttgtatgcaatacccttggaagtccagaagagggtgttggatgtcctgggtttagagttccagatggttgtgaaccactgtgtggattctgagactcaaaccttggtccactgaaagagcagccaagactgttaactgctgagccatctctccagttcccaaatcttcactatgaccattatagaaacatttcatttcaaaatgaaaactccatgggaaaaatgataaagaatacatcttatacagcaggtcagctccaggtaaaggatgggtcaagcttggttacttacagtgaagtggccttggccagggacagccaaatcctggcttctttagtagaccctctaggctactaggttctctctccaggatattgatagaccgttgctgtattttgctctatttatagcaagataaccaactgcaaatatttgacgtgttccctgaaggtactgaatatctactaactacacattggctgcaagaaaagaaaatgtaaattctggcactaaagcagaaaaagccattgtgttcagtcttgaggtgttaaagaagcctgccgaacagagcctgctggcaaggagaggcaggtagcctgggaagaggcaagcagcctgggaagaggcaggtctatttcaacacgcttggctggagtacgtgaccttcgcctctctgtcagtgttttcctaggttcagaagtcaaagtcttgggaagtcagggctggttgctaaggttaagtcacacgcctggaccttggctgtggcaggacccagaggaagacttagagctaaagtgtctggagagctggatcctctagctggaagcgggaattttactgatactgtatggacatgctagctgagagaacggatcctggtggaaacaaagctgctgttgggcagtggagtgcacagcagatgctggcacctaccggcacctcagagacaagaatggaaagctacagggatcgggctcaagagcctcgagctcgagagtgttggccctgcgagctggtttagtgctttccaaatgataagtggtggctgtcacttcctcccgtctttctcctcctcctgtcttttcctcttcctcttccacctcttcttcgcccctttatgtttccccttaactatacacactaacatttctttagataaattgcagatcggaagttaatgattctctgcatggctgaagggtaagaggacgcatgctcatagctttttgttttccattttactgaagtgccaatagactctctgaacgagcctttgattgctgtaggttgattttccaggagctagatatttgcccaattgaaagtcacactgtggaaacctctctaggtcataccaggggcactttgggtgctgagcaaaacattcttggcagataacttctttttcctttctcacacaaatatgtatataaccttagttatataatgtacatattgttacatatacgtgttgttaatatctgggcaaaacaaatgccaaggtcacttcttaggctagttcttccacatgtcccaggaaagagggcagcatttgcctgggggggggggaggggtggtgtctgtgggcattcaggaatgcctgctgatttatttagacagacatttttatgacctgtctagcgagtgccctctcttacctgccaagtctctctaaaagctcaggatgggtggagaagcaataactatagtaatgacagggactccgcctggggaaggcactagcagttccatgacctacatctccttcagccacgttcttctagctccaaacttgaataggtccgagtaccagatttttttcagaggatatgaatttaatgtgggtggagtgagaaaagccggctcccccacgccgctcacctccccactactcctctctgcttcattaggagtggtcactttttagccaggctgccaggctggtacagcaagcatcagtgtgctgcttacccacgcgctagcttattccgtctggctcaagtgtacagctggaacttccagactggggactttgcagtgctataatggcttgcctactctttgtccttagtatctgctggcttgatgttacaaggttagtgcaatagtagaattttctcagggttccaagctcttttaagctgtaatgtctgggagctcgggggaaaagcagtctcttgctagatatactatggatgtcagaaacctatgctccacatccttgtggagagcaaagagcttggtgtgagcatgtgggatgtaccatgctctcttgaccccatctcagcccaccgtgctccagccacatggccctttccaaagctgagtcccctctctgagtgtttctctccacatgatatctgcatttcagcctgctaaccctaatccttcaggtctctccctctccctctccctctccctctccctctccctctctctctctctcacacacacacacacacacacacacactgatatctcagcccagtccaaggtcctcttggtagcaccgtgtccagtgtcccactgtggctcagactttccccttagcatttgcacttttggggtcctttgctagatacttctgtgtgctgaaggttcctggtccatgaaggagggggtcatgctggtttggctcagtgttgtcatcaagaactctcacagaatctgagttggggggggggtcacagtaacttctggcagcaagagcagcaacagttcacgtctcccgtcactcggtgtagccactgcaatcctggagggtgcagagatttgggagtgactcaaaatagcactaaccgagcataatgctctcagcacataatctttctcagcacataatctttctcaagctgaggccacaaactctaataaatgtagatgtagtgagtataccaaacatatttggacagtaattcagtggtaagttgacttttaagcaaaggaacattatagatttttttttttaatttgagacagggtttctctgtgtagtcctggaacttgctctgtagaccaggctggccttgaactcagaaatcctcctgcctctgcctcccgagtgctgggattaaaggcatgcaccaccactgcctggccttggattgttaacagtagttatgtgtagggaaaagagagggacgaggggctcttttaagctctatcactatgctctttcttatggtggtaagataacaaaagaaagtgtgtgccacctcaatgatttttagatatgcaactcagtgtgcttaagtacttctttcttctcacaagcatcaatgttgtactttttattgaatactgttaatgatccactgatccattgttcatctggtttacctgttggtaggctagcctgtccttgtttgcacaagggccattgagtgcaatgggctgcttggcatcacctgcctcttttccacagtaattgagagaatggccagcctctcctgtgtaagggaatgctgctcccctaagccggtgtgattaggaatgaatgagtcgtagtggggtcatccctcgagctaatgaaaggcaaagctcttgggtgtctggcaatgtggaaggcattttggttccgtgaaggaagctttctagatgctgaagtcagtgctgctggctgaccgtgatgagagctgcagagggaggaagctggatcaacgacaccttctccgtgcagaagcctctttgtattttcctcattgctattgtgtgtttgttctgtgagacccagcctcaggggctctgagagattcccagtgagcactccttcatcccattccatcacttatttttggcatagctataacttaagtataacactcataaaaatgtcagtctgtgttagaaactatttattgtcccttttactctggggccccttagcttataaaatattacattttccattgcagcaaaacatgtgtctacatgactaagttctggccaaagagttgaaaaaaaatcctttttaaaaaaaagatttatttatttatttaatgtatatgagtcctttatatctgcttgtacagcttcatgcctgaaaacggcatcagatcccaggatagatggttgtgagcaaccatgtggttgctgggagttaaactcagaacctctgaggaccagccactgttcttaaccgctgagccatctctccagatcaagaaaaaaaaagcttttaaaaaaatttttaaaaaaatttttttaatgatatgtatagaaaggctgagaaaagctggcctaactccactagggctgaggtcctttgatctgttctcctttttctccccagaatgctctttgggagccaagctataccgtaaggttacatacttttttttttttttaaagatgtatctatttatttagtgtatgagtacgctgtagttgtcttcagacacaccagaagagggcatcagatcacattgctcttaacccctgagtcatctcaccagccccgtaaggttacctaagtgtagaatagcactttccaaggcattatggtattgttaagacggctgtctactgggctggagagatggctcagtggttaagagcactgactgctctgtccccattgtcaccttggagagttaaagctatgctacttctttcctgatagctttcctatagactgtcaatctccataaagctacaagagagagatctcaaggcagctcataccaccaccatgcttaaaggcctgcagcagcacgggtgacacctgcctaggaggctcctcacacctgggccctgtccatacttctccacagccacgaacacacgttctgtctcagcgggtttttctgacctggatatgttgtatgagcagatgacattacgggtggctctcttggcattgtgagtccacagttcattgttctgtagcacatggcatcctgactctcttttttccctcgtggcttaattttgcattggtggctatttgggttgactccattttgggctatcagtggatgttttcattctccacccaccttcgtgctcattctgtattgatcctctatgttgaactctttgaggaagcctctgcaatctttcttttggagggtatgcccagttgctttaagaaaattattttgtgtgtgtgtgtgtgtgtgtgtgtgtgtgtgtgtgtgagagagagagagagagagagagagagagagagagagaaagagagagagagagagcacatataagcacaggtgtggataaaggccagagcacaacttttgggagtggtgtctctttctacaatgtgggttggcttggagacagacattattcattgagtaatctagcttgttgacttagttacagtcctgtgacacactgaccaaggtgatttataaaagaacatctacttgggggcttatttacagtttcagagggttagtctatgcccatcatggcgnnnnnnnnnnnnnnnnnnnnnnnnnnnnnnnnnnnnnnnnnnnnnnnnnnnnnnnnnnnnnnnnnnnnnnnnnnnnnnnnnnnnnnnnnnnnnnnnnnnnnnnnnnnnnnnnnnnnnnnnnnnnnnnnacagtttgggcttttaaaacctgaaagccaacctgcaggcaaaccttttccagtaaagccatgccacctacccctccctcccccccacccaacagttccacactagggacctaacattcaaacagagaagcccaatcctgtgtgggaatcattcttattcaagccaatactcccccactcccacccccacccccagctttgtttgtgagacaggatcttgctatgtagccctgcctggcctcataccaggtagtccaggttggccttaaactctctatcctcttgcctcagcttatgggatcgaggattactgcagcctcagaccatattcctgcctgggtttagggttttgtttctgcagagcctggagtgtgtttcgctcttttgccaggccctaattcagtctccagtttttccctcccccttgcctctttctttcctcggtagactccttgctgattttagtaggaaatgaacctttcaaactgcctaggagttattggtaaaagtcttttgaagtctgaggatggacattaaagtggcctcatctgtggcactcaaatggtgctgttatttaacagagtttatagagtaggcatatttagatgcttcccagagggttaagactcctcctacagctcacgggccaaacaaactcttaattactgcactcagtcggaacgtttttaaagaatcactttgaagtttcctggtactattaccatcattaaacctttacatgtaaacatgtgttgtgagtttgtgaaaaatgtatgccatgtgtgcacctggcacatgttaattgcttaaaaattgctagttgataaagtgtctccagtgtaagatttgctgtatacatttgaggaaggtattgagttctgctttagaacgcatggaataggaaaggagttttgtgggcgcactgacacgaattcacacttgtccacgcagcctcccatggtgaaaaaccacaaaaagtctggcatttactttcggcgggctatttttagcagatcgcctctcctacccgtgtaaatttaatctccagaatagaacacaagcagggtcaacgcggtttagccacacgctcccttgtcctaagccattcagtatggacacgaagaaaaatgttctagaatctgtagagtccacgctgagttggagacgttaagcattcccgcgaaggcagctgattagacaaggagagagagcacccggcgtgcgagcccttgcacagcgaagcacccttccttcggtacacagataaaatgagtcaatcatttccacccgccccgacttttaagtcgtctgatctcggggaccgaggcctgctattacaaacccaccatcccgttcggtcaggcgtccacttcggggaccagcctgagtcacctggaccttgtgagccgagatcggggaggtgcaggcgtccgggggtggagggcacagactacgttctccatcgccgctgcctcggaaggaagaggaggggcgactgcgcgtggggaagagaaggaagaggcgttcggggaagggcagggaggaggagagccgaaggcgcccgggcgggagagcaggggcgtgcgggcgggggcgggnnnnnnnnnnnnnnnnnnnnnnnnnnnnnnnnnnnnnnnnnnnnnnnnnnnnnnnnnnnnnnnnnnnnnnnntgctgcgctcgccgcgcgctcagccctgctagccgctcgctgccgccgcctgggaagcccagctcggcctgcgcccgcgcgcaccgccgcagtcatggggctgcagcccctggagtttagcgactgctacctcgacagcccgtggttccgggagaggatccgcgcgcacgaagcggagctcgagaggaccaacaagttcatcaaagagctcatcaaagacggcaagaacctcatctctgccaccaaaagtaagcggggtcctgttcgcgttcgggctgcggcgtggcgaggaaggcgggaggatcgtcttccccggccaagtgggatggctcagtgctcctaagaccgggctggaggaataggcgattccttaggggataagataagctccagggcattcctctcccaggaggttcgggcgcgttcctttccccgatcctggccctcggtggcgcgggagcgaggagctgtgcgtgggagctgccccggggctcccgcctggcccagctgagcacgctttggcgccggccggagcgaatggaggctctgctccggagtcaggttttactgcgccctaacgctgcttccagtctcccgcaaaatagagacatcaatcagtttgatagttttgtctcctaacatttccaagtaattttttttggaaatgctttgggactctgcctgtagttgatatcgtcaaaagtcctttaagttacacctcttatgtatcccctttctgccttgcgcgacagcaccgacctacgtccctcgtgagctaaaccagaaagtctacctggctttgtgctgccttctgcacattcctctgtcttgtgctgaggcgggttcaaagattaggggttgaaagggtcagtgggcagactgctccaggttctggcctgcgagaagtgcctgtgagtaggaaattctactcttcatgctcgaagctggccacctcagttccatctgtattcaaacaagcaagctaacacaccctcaagccacctctgaagacaacagaaagagaggtgtatcgaagctgtagtgagtcttaggagtagaggctggttgaaatttgtgcagaaacggttgtaatgttctataaatgggcgttctccaggaccaggtgctggcatccaggccaccctggaaccctgaattcattccttgagttattgcgaacacccctttccctccttaaaaggcctgatagtgcaggagccaagcataggtgctctacctatcctcttgggttggttaggttccctggctcaatactctccatctctgggcgtttattccatttgtttgtagacagcacccctggaaaaaacaccccaggtacattttcaccccaccgttttgtgtccaggaagattaaaacgtactgagtgtacattctcatccacccaatcaagtgcctggcctagttaatattcacttaatgaatgagttgaaatattttttttaatgggaagaatttagtggagccatccctgtaatttgggaagcaagtcgctcaacttctctggaccatctccaaggttcctttggttctgtgacctcttccgtatttcaaagttgggactggaaatcacttttttgatgagtgggttatttgcttggtggctgtgcaggcctttggctttgaggttttctgttctaggtgggaaacagagggagagtcagtaaatgtggagaaatgaccagaggcagggaggtgtgcggacatccatggactgggaagtggatgtgtaggattccatggccagtgttcagcatcagtagatgaggacatacgtgtacctattctttaaaaactgtgtgtgtgcttttgagccattgtacgcgtgggaggtcagaggacagcttcggagctggaccttcctttccgtgtctatgtgggctctggggttcgggtgtcaggcatctcccagtctggtctgttggctagtagcttcctttgaagctagggagattaggagaggggcagatggcagtcagtttggccataggtagaaagctatttctgtgactgcatgttagctgctccactggcaggaagcatgcctcacgtccctgaggcagccagtgtgtgtgtgtgtgtgtgtgtgggggggggggctagttttcctcctcctcagaaggtagaccttctggaatttgtgacttgtgttttaatccttgtgcgtatgattaaagatgagacacaaaatggatgatctcatttaagggagcagccagacagcgctatcttttctatccttatccttaactttatactcttcccctcaagaataaaagggttggtgtacaccattttggcaagttggaaagaccctggccttttcccacttggcacattaaagttgtctcctagttcttaggagagattgaaaggctgggcttcatcaggagaactggcgatggttttcactgtggggtctggcttggcggggcgggtagtgcaattcttgccatgcttcccccatggcccttcttggcagcacaagtcaagttccctcgaatttggaaacctgcggatgaggtcacttaaccagttgtctttccggaactgtggagtctagagtctagaaaggacttttcgttaggggaagggtctgcagaaagagcagttatcaaactgggcaagattgccaggtcgcctgtttcttggtgttttataatttggtttgcagttactctgtgccttttgtgtttttctttgggtggtgcatttaagtgatttctgttcttcattggcctgcaaggcaccttgacttgtcattcgaatgtcttgaagcttttttttttttaattcttccataaatatttaagggagctggggtcctgtagggcctgaaggcctgttggtgagttctgtggccgcaggaggtagcttcgacagtttgatgctcttgacaccacagagaagtcctgtctttacggatggtttcggcacttaatctgagcaacagttttgaactatctgtactctgccaagctcttgaaataaaggatatgaaacgatacaagtcgagcctgggctgtggaagtgaactcctgcagtcatagaagtttggaggccaatgtaggaggattcctggcttggggtcactttgggttacaaagtgagaccctattttaaacaagcaaacaaacaaacaaacaaaaaccaattaaactgtggagcggctggagcgagagccaggtcagcacttgagcacatactgctcttccagagggtcagagttggattcctagcacccatattaggtggttcacaatcctttgtaactccagctctcggaggatatgatgcctctgtggcacctggatttgcatgcatatacaccttccccagacacatatacatgacaaaaataataaaaataaaatgtaaaaagagaagcccaagagagtaaaaagatgatgtgacagtaagtatcccgaccttctcagcaacaagtttgtggtagagcagaagagatcccttggcgtttcagagctcaagcgatgtcttataataaggaagagagctttgtcagattggaaacagacgagccagaaaccggaaacacttgcagagcccgggaagagtgaggtggctgaaagggaggtttcatgtaagagcagactgacaggaaagggtcagtttccagattatagattaaggtgaaaaatcggaatgctctcttggagaagccacagaggtgtttcatgggagcctgatgtaagcggagagagatggttagagtggaggtggagtattggatggtgtgtagggtgggtttggacaacagcgtgggggatgggtggttgggttgggaggggctttggagaggagagtcagtgacttatgtgggagagtggagatcatccactcacttcaatggagtctttgttcagttggctttttagttcttgcttttgtcgttcctccgcactctgtagaataaccagtgtcctctttcagagcagtttagacaactgtgggctttctaggggaaaaagtataaggcatctatgattcattaagttctcatactcgtgaatgttcccttccggtgtattgagcctggaatgtctaactgtaggggaaatggtgtcagcagcagtcctaaccattgttacctgcccctctcggtatgtgaggtaaacttagcttgtaaggctttgtgtgacccgcctgctcccatcacatacaaggagaggtccttgctccttccgagccaggtctagaacgggtctgcccagactaagtctttatagattgaggcctttgtgacttagtggcctgtactttatttcagttaggcaaacacgaaaagccccctcctttctgtgtaatggctcagaggtgttcttttggggaaatttcttaagttgcccttacacactgtaccgcgatttggaagaacgagaagaagttcagttctctgtaaactggagtgttcgttttccctttttatagcagtgggtcagtacaggttgactgacgtgcagatgctctggtggaccccggagactcctttccttctgtcggtcctggttttgttcaggtgactcatgagcggggtacttagggatgatgctgggtgctgtaacttgcttctcactcagttccaactgcgctgggaagacccaggcaagaggggcagggaaccgtgaacaaactaagaagcacaaatctcttaaactcgagccctgcttagctaaatccattttctggggctgggaaattgttttaacactaagaactccaagggctggggaaatagcttcgttggtagagtgcttgcttagcctgcctgaggtttaatccccagctcccatgagccaggcttagtggcataggctacaacccgagcactcacaaggtataggtaggtggatcaaaagttcttggctattctctgctacatagcaggatttaggtcaatctgagataaacgaaaagaatgaagattccaatctcagtgaagctgaccagtaggaggctgacctgctggaggctttgggggaaaggccgccttttgccaagaggaccacaaaatcgatctatctggcagggctccttgccatttctgacaatgagtggaaccagtctgagagtaatgaactaattacatctgtgtttgtggtgccgtgtgagccatgcattgttttaggccggaggccacatctgaatatttgttaaatcccattaggacagtttggggtggtgttctcttgttcattttgttgggattggtgttgtagatttgtgctggcacagttcctaagtggaaatgagagcagtgtagaaaataaaatatttgaaaagctcataaaatgacaagtttaactttttcctggatagaaaaaaaataggcctcttttttttttttttgtccttaaaaatacactgtggacccctccccctcccccgcagtcgaggtctcacctggaataagccataagccccagtttggagtttattctagcagcctgatccactgtaggaatgtaggctggttgggaaaataattaggatcaggtttgagctgggaagagggcagactggtgaaatgcttttctcaccgctggtggtctttggttctgaaagagaatctccgagcagcaggccgttgctcattcagaatgttcactgctcagtgagctgccgtccatgggtctttatgaaccattgttggtctgtcccatctcctggggctcctttacctttgtttgtgacacactcaagatatgtagcctgctggtctcttactcctgacccttttctctgtctagtaattgctgggatcacaaggtgtgctccaccacagctggctctttccagccttttttcgaagttcttcaggcttctggaagatgattacggcggagaggagggtgcttggtgtttctgtgatgactcattaaagcagctgacgagccaggtgtggtggtgcagtgcgcttaatctaggcacgcaggagtaggtgactctgagtttgaagccagcttggtcttcagagagagagagagagagagttccaggccagtcagggttatgtattcgactctttttttgtttttttgtttttttttttttggtttgtttttttgagacagggtttctctgtgtagccctggctgccctggagctcactttgtagaccaggctggactcgaactcagaaatccgcttgcctctgcctctgctgggattaaaggcgtgcgccaccacgcccggccgaaactctgtcctaaaaaaaaataaaactaaagtggatgaaggaatgtaagaatgagcagtgtagcctgtttgtccatccacatgaagccatctggtaacaatgggacctgggtccagcttcgtagcctgcctgcctttcttcttttctctctctctctctctctctctctctctctctttcttcctttctttctctttttcttttttttccttccttccttccttaaacatttatttatttattatatgtaagtacactgtagctgtcttcagacacaccagaagagggcatcagatctcgttaaggatggttgtgagccaccatgcggttgctgggatttgaactcagggcctttggaagagcagtcagtgctcttaaccgctgagccatctctccagcccctccatagcctttctgtctgctcacagtttatacatgctcctctaggtttctactgggagtgacttgatataggtaaagcatttagattaaactcaatgataagaattatgtctcccgtgaggcctttttcttggggtaaagaggctgttgtggcttacagaccggtcctctagcttttcatacttactacttctaaacaatgcatttctccaaattgtcattacacagagcaggggcatggattgccagactctggaaagagccacattctgacgatgctgggaagttgtagaaatcaaagtcaagtgcacaggtactcctggaaatctgacttccacgatgtcacagagacctccagtggaccatgcacagctgaggtgcaggcagccagacagggatgacagcatccagtcagggatggcagccattgctcaagggtgattaccagtgacttctagacacttaacatggctgtgctgagcttagggacattaaggcattgtctctcatgctgggaaaccactgctcctcagtggcccttgtcacagtgagagaagagagctctgggagagcggctgtcccagagctggtgggcagtcctggcctacacctgtgagtcctgagtgaggctgagcagctgtggtcttggatagatatttaaacttttacatctgaccacacttgaggtcacagtgtcttttgtcatgtctgaagtcgcttgttaggaatttaaatgtggagattttgtctcctggctttcagtgtcttctaactttgcctatgattttctaaaagttttttgttttttgttttttggttttttttaaaggaaacttgccaagttggctttattttcaattttgtggaggagtgttgaacttcccagctctttctaagtagaagtgtcttgaatgtcttactagattcctttaaaactgaaacctcagagacaaggtttatttaaatgtgcatttaaaaattattccttgggcctgaggaggatcaatcagtgttttaagagtacaatgttactttcacagaggacacaggttcaattcccagcccctacatggtggctcgtaaccacctgaaactccagttccaagggatccaataccctcttctgaccggggtgtacaccaggcattcacatgatacatatatgaagacaaaacactaaaaaattaaacattcttatttaaaatgtgtatgataaaagccaacttgtattaaatattgactccctgctttacttaatttactcatattatatattaagaattattccatggtgtttgttattatgctttattaattaggaaacagtgaagagagggctaattgcatgtccaaatgacaatttggtggagttggaatgcaactctgggtttgtctgtttccccacctcagctcataacaatgtcaagccatctggaaataaggtgtgtgtgtgtgactgcggtcttctgtagggaatgctacagtggaaaatcctcattatctgcaagtgtacagtggatattctatagaatgtcctgattagttcaggacagggacaatgatttaaaatttgaattgtgaccattgctataaataaaactgacagttttaagtatagatatccagaaattattttggtttagttgtaaggtataaacctccattcaaaattctttatcccccccccccttttttttaatctttagctgcactcttctcctttggttccctattttcttttcactcttcctcttcctcctctccttccttctcttccagcccctcctctatttcttcctcctttcgatgcttaccttctgaggcaggagtcacacccgtatcaaccacctctgacctagctaagttggcttccccggtccaactagattttcttctctgtgtttcctgaggttaatcctgtaccatgtcatgcttcatctctgagtgtgacttctccacgctcactgatttgctcgcccacaggcacctcagcccttgggtgctgaagcaacgccgtcttggagcaagtggtagcgaggaggtgtggctggaggaactagattagccttgtcacttggttctgcatgcaggatgtgtaatggtttctagacagttgagtacttttcactctgactgtacagttggcaccatcacatagatggatggtgttgggcaagttaactcaagcctcaggcacctaaggtctctttattagtcaaaactatcattgattttatatacacacacacacacgtgtatatatatattaaattaagaaagtcttactctgtgtttccttggctggcttgaaactcaatgtgtagaccaggctggcctcaacctctaaggcagcccacctgcctttgcccccagccctgcaccccccactgttattttattattattatatcttaagtagatagtctcactatctcagcccacaatgactccaagttttgggttcagttgattctccttgctttagtctccttactaccttggctacaggtagggtgtctgaacctgcggggtgacagtgtttagtattcacaccaaatatttaaaaaaaaaaaacaaaacctcagagaactgcttatagtcactactaaaagaactttagctcgccaggtgaggagttgcaagcacttgggtagcagaggcaggcagatcatttcaattaagagaccagcctggtttacacagtgagttctataccagcctggtctacacagtgagttctagaccagccagagctgcatagtgcaatcagtctcaacagtaaaaatctctgtcctagattcctttgattgtcttatttggttgcataaattgccttatcaataaagataaagaattagtgttgggattcatatgggcttgttttttcattcaagctaacaatattttaaagtccagagctcttgttgattaaataggaaaacccatctgaaataatgtgttgaaatccacatgccctcttcataggtaaaggtcacatactgaacccctggtatagctctggggccttctggtttccccttgtcagattatatggtcagtgcccacagcctatctagcagccacttatcatctcattctatcaaaagagaaaaaaaaaaaaaaaaacccagctagaaagactgaggatcaagccagctgtgcctggcccactgggagcgggatgccatcgacatattaatgtgacgatttgagaatctgacatgtggtacctttgtcatgtgatggatgggtttgctgtgttttgtgaaatttgggtcaaaggcggcagagcagttaagtgacaagtcaccgtgataaggtcagctttactttactgactgtgtgacctcaggccggttgcctgtttttccccttctgtgatatatgggtggtaattaagctgaatggtgtcacctggccctgctaatgcagcccccttgctagagaagactggacacgagaggtagagttccagtgatggttatgtaattagttggaaggtagcttcctttctgctgcggtgtagaatgctctgccgtaggcaacagggctagctgctttcagagcatagaggaaggcagtagagaagttcacatcgagcttcctgatcggagtctggatcctggaatattgtgagggctgccgagatgccctgtggaaaattctatataccatgcaatactgtttcttgcacaaaatctcttaagaatgcggtgccagactgccttctgcacccatgcatgtctcatacggaactgatgagtttggtgtttagtatgaaggaaaagagtaagtggataggaatgagtgaacgaatgaacgagcagaggaatttggagaaagtcacagaggccaaggcagagcagccaaggccaagttcaggtaacatttcattagtaagatggggagtttcgtgactgtaggtatgatgagtgtgtggggagcagggtcctcggtgaggagaccatccggctatcctgattatcactctttctttgcctcactcccttaaagcagggtctcgcactgaaccttgagctaggctgagagccagctattgctaataatctttgtgtctcttccccctgtagtcctgggaatacaggcatgggggaccacacctggatttttacaagcgtgctgtgggatccaaactcagcttctcatgatcgtataacaagcactctgcccactgaacggtctactacgtcatctctccatcccccaaaggcaactcttttaatgaggaaaggtttatttgggctgatggtccatggtccctaggcttcttgctttggacctgtggcggcagagcatggtaggagtgtgaggtgggggagccttattttctcctgaaatgacgtggtagtcttttgagaatgccttctttcggttttgcggagtgggctgcctagtatccaaagtcagggtcagggagtagagaatggagagagctaaatagctatgatgtaaactctgggctcctttaaaatggtcagcttccgcagaggctcaagtgaccatgtaaatgagtctgtctatgaacagtcacacttgaggaaaccggatgtatcctgtaaccacagtcaacagggttttgtttgctataacactatcgactgtttttttttttttttctggtagtgtctgcctgagtggcaggtctgatttatcttgactgttgtaaatctaaaaaaggattttaagacgtgcttttgtgtctagaaaaacagaggtgaatttgtaaaagaagttttgtggctttgacatttaatttcaggaccttaagactgggtgtcattttgagtgggaacaactgaattcaatgcatgacgtggacggaaggcagagaatggatatggaggtggcaccactgccgaagcctgtacaggcgtcagtgagcatgtggcctctggaaggcgcaggagaaccaacaatgatgacgagcaatggtcgactctgccagtttggagctgaagtttaataaatacacacaaactctacaggtttacatgagggagaaaacttagaagaacatgtaatctataggtgctaaagaaggccttcggttggaagactactttcatccgttcacaagccacagcacttcataaaagtaggatgggctggcacttgtcggtaatgtcagcgttctagaggctgggggggtggtggtcacaagttcaagatcacccttgtctatgaagtacatttgagaccagcctgggcagcttcagatctgtctctctcaattagtcaataaataaatgaaattgttgatattcagctcggtggaaacaaactgggtgtgaactaagaccataaggttagtgtagtagcactttaaatgaagatacacatccctatctttaactttagccaataatgagtagattatgactgctcagagatactgagtttcagttcatttggttgtcttagatttgtggcaagtgtgagacattgtgtgtggagtactacggcagttactagtgagggttgtagttgttagctgacagtagctatctgtctgcatctccaaacacatactgtgtctcaggggggactgtgcatttcatgacaatcatatgttaaaaggttttgttgttattcttgagaaagggtctcacagtgtagacaccgctggcccccgcaactccatgtagaccaagttgtcctcaaactcacagagattcacctgtctctgcctcctacgtgctgggattaaagatgtgcgacacgatacccggcaccacagttattcctcttaaacaagtaacagtttgcaacttgtgaagttgaatttgaagaggagcattactgacctccagagcacgggctcctatgggtcataccctggtcagaactcttagttctctaggggagcatgtcttatctccatcgataagagtgctccacataccggggttgaggtattattttgtgtgaagccatgggttatagtgtctgtagtcattactttagggaatcagaaaagttttcaacaagaaatttcctgggctggtgacatggctcagtggataagagcacccgactgctcttccgaaggttaggagttcaaatcccagcaaccacatggtggctcacaaccatccgtaacgagatctgactccctcttctggagtgtctgaggacagctacagtgtacttataataaataaataaataaatcttaaaaaaaaaaaagaaatttcctttaggctgctggcccctatgggctcatatatctgaattccttgtcaccggagagcagagctgtgtgaaaggactagggggcatggccttgttggaggaactgtgccactggggatgggctttcgatgtcaaaggcccatgccaagcccagtttctttctgctgcctgaagatcagagtgtaaaactctctgttccaaggccatgctggccagtgtgccatgctcgcactgtgaccatgctggccagtgtgccatgctcgcactgtgaccatgctggccagtgtgccatgctcgcactgtgaccatgctgaccagtgtgccatgctcacactctgaccatcctggccagtgtgccattcttgctgtgtgaccatgctggccagtgtgccatcttgctgtgtgacgctgaccgtgtgccagcttgcactgatgctggagtgtgccatgctcgcactgtgttgacggatctgatggtaagccagcccccagttaaacgctttctcttgtcagtgttgtcctgctcctggtgactaagacagttgctgagagtcacagggaagacagtcatcctcagatgatctgaattactgtctacaccgttatgtccatcacaaaagaaggagctgatatttgcctttaacagaataaggtttcaaaagtaatgttattactaatgatctagggggtcacacagggccactgacaacacgcggctggcttttgctgggtagtttactaagacctgtgttagtattctcctaaaaaagacttacagaaggttttgttttgctcccccccccccccagactgtacagtgtggctcagttggtagagtgcttgcctaggctgtgggaagcaccacacaatggtggtggtggtgacaccatgctttttagaactgccagcagctgaggttaccaggaaggaggagggatgaacaagattgtccccccaactttcccttcaagggaggaggggctcccaaggccccgcccttccctgaggatttataagatagttaataagggttgctggagacagggccttataagcctttcctggggcagcatttacagtcatttaacagttgctggagggggggggctcatgagggttccgacatccttagggctgtttagacagttcacagctgctgggggggggggttctttgtttttctctagtgggtagctccccgcactgctgtgaggccctccatttaaactctaggccaccatagttgggtggaatctttggtttgcttcagcacattgtcgccgtgggctatggagtaaggggtagctcctgcctgaagtgacttccggaagaagctttgcaccgtttgtgctgctgctccagcttttctcaaattctagtgccagcgccattgacgtcagtcagaaccgtgaggccagggaggccttggggtggtggcggtggagtctgcctccggtagagccccctcgggggatgggggagcctgtccgtgggcctctacggagttgatgaattttggtaatgtgaagacagacttaggcgatgttggccacagttgggatgcatgaggtgtctctctgagctcctcattctgtctcagcaggcgccagcaggtttcctgagtttctaatgcccgtttctaatggcttcttacatgtgacttactgaagggtgggtgtctgtattataaattctgtgttcaatagagatagttgaattttctttgttatgtgtgaggaaaggtagtatgtggtcgtatatgcttttgttaaattttgttaaatatgcttttgttaaataatagaacagagtttcttgagaaacacaaatgtttcagaaggacaattttaaaatttccaaggataataataataaaagtaaatttgttatttaggtaaaacaaaatggggcagtaatattagacagtcccaattatttttagaacaaaaatgacattttgttttctcatggcatgtgattttgtgcttacatttttcacttgccaggtttattttattaaaacttggcctggcatagccggttcttcagtacacagtcggatgctcttggtttatggcatcttgttctatttaatttcttctagaaaatgcaaggcattccattccccctgcttgtaagtgggaaggactccgctgtaagacggtccataccgtgttatccagatgcagcccggctcctgttgaagatgctgaccttactggcgtgctttcccttagcgggttgctgttaatagactctcctctcatgcccatacatataggtgatgcttctctctgtagaagacgtgtcattaccagagcttggtaccactggctgctgggccgtgggagcaagtctccagacagcttggttggttgataactcaccacttgtcccacctgttgatcgagcagttcttcagcactgacagctgcatgtggcaggagagccaggccacagaccctaacccacttggtcattttttagttctcagtgtttagcctgttgctggctggtttctgaggttgaggagtccaagattggttgcctttttgcctcatccttgcaaaatggtttacacgtcacacctggcttgtttgaatggtgaagaagaaggaagaagaaaggttggtctgtatcagaagctgtcttaagactttccagtgtgcttagggttagtaggccacagtttttgcatgagttccttcagctgataggtaggtgtgagaatataagtcactgcggttcagctctagggcagcaagaaataaaacaaatcgtgctggcttctggatcttccagtaaataattctagaagggagcatctctgtgtctctccagctacctagctgttgacaagaaccatgccctttcctggttttagagcatcgagggacgaagaggcatttatctaactagaaagtccagtctaatgcagtctaaggcagaacaaaagtggccgtgaaactgagtgctgcttcttcagcaggaggcgttctcggtgttagctttctgtccctgtaactgaatagctgaggtgttagcatccagggaaggtttacctgagccatttcctgaggcttcagtccagagtcggttgaccccactgccttcgatgtggagcagcatacatgaaggtaggtacatgcttacatggggacagccggggacagagaggaggagggcctgggagaccaccaagtcctcttgaagatctgctactaggatccgtcccgtcagggttttatctctgtccaaccgtgccaggctaagacctcaccagcatttggtgcaggtgatcttggggggcatttatgatccaaacgatagcccctggactccagaggtcatgaagctgctcaccttgaggagaggggccatggtctgggcagggttggtggtctagttgcagtgagaagggaagaaaaggaaaggaggagggagggaagcagggagggagggaggactgtgtctgagggaaatgaatgttgtcaaaggggaaacagcatggcatagtgacttgattgggtttgttgaaagatcgaatgttgtcagcttgaagcttgaaagtcagtgggaaccaggtgttgtctagttttggtctagttggtattcccagggtttgatgttccctgctggtcatctggattcgtcttcttcatccgctgtggcagtcgtagcttctttccaagcataacttctgcttccttgaactctgcactcagagccttcacccggggcttctctcagtcttacccgatgctgtttctcgtgtcatggtcctttgggggttacactggtccagcaacatagcagtgtttggacttgggaagaggcggccagggctggctcttgccggcccttgactagccttgtctgtttcctgcttcttggacaaggggcctgctcctgtttagtgagcctgtgatagtggacacttttgtgtgaaagtgccacctcagcagggctcagagcagggccaggtggattgagaggctgggcacttgacagatacatgcctaacagttgtgctgtagtttgctgcgtgtgtcttgcagtctgcaaatgctgtttttattaatttttttctatcattctataaagacttgagtacagatacacatatgtctaaagacttgtgactaatatttttggggtctatttttttgagatacaaatcacatatcccccagtccattcattcaaattgtgtagtttgatagctttttatcagcttatgttagttttgtgtccgttaccgtctgttttcctaagaatgccagccttgcgggattggtatgaatgatagtgtttagtatgtggctggtgggtactaaggtatttgcagcgtaagctggtatctggagctagagcgagggctccgtgagtaagggtgcttgctgcttcagcctggtgacctgaatctgctccctgaatccacctaaagctggcccagctttgtccttggacctccctgacacgtgagtccctgccatcagtgatgctagttttaaaagttttaagagctggtttcattttattcagatggaaactgagactgcaaggtaagtggtagggccaatgtgtgtatcagtgtagctcattgtgtaaaatacaccatgaactgtatcagtcaaatgtttctagtgatcactaagaggaagtggagttaatctggcctgtccacccttttaagcatgtaatcagtatgaaagttattagatactttgtatcctcccttttcaggtaggatgtatatctccatttagaataacacatcccagcacttaccagtttgctcctgactgctctgttgggtagtgcggtcggcctgacttttaagtctcgaggttcacaccatgtccccttccagttggggacaatactgagcattatctccacctgctgtatgagtggctgagcacccccaaagtattcgttgccttatttgatttcctcagttaattgagggagacttttaggctatgttcagttagcttgtgaattttcacgtaggatgtaaagatctagagtccttaaatagagtgaccaagtaagtgtacaaagtttgtagttggctgtgtcaggagttgcatttagctctgagagttggccttaggggcacacagtcgacacacatcaaccgtagagctgcgttctgtggtcctatcctttagactgtgtttgcccatcagttacttctgtgttgctaagagagcagcttaaagccaggaaggtgtctatgtgtagggtgtccctctccctcccccatgattgtagagcgttagttttaagccttcctaatgctgtgagtctttaatacagtccctcatctggtgagggactctattagacataaagctaatatattaaacataagggttttgtccctgctttgtaactgtaatgttgctactgttatgaattgtgatgtaaatacgagttttctgatggccttaggggacccttgtgaaagggttttttgatccccaaagggttgagagctgcttttatatagagggttctctccatgactgcttggacagactgtcatggaggcaggagcatgaggcctgtggatgctgtttcgtgtcatggtgtaaaggaagctgaggggccggagacaagatcttcccctaaccctcccttcccatctccttgtgccccgagcccgcagggcttacttataaacttttttttctattgagattaggtttctctgtgtagtcttggctatttcactctgtagaccagggtgcccgagaactcagagatttgcttgcttctgccttctgagtgctggaattaaaggtgtgggccaccactgcccttttaaaagggacacttcataacattatacttccctccctgcagttttttaaaactgagtctcttacagaagctccaggttagctttgaattcattacatgccctcccttcccttcatgctgtgattttaagtgtgcgtatcaccattcccagtaacagttcttttaaagaatttattttcccatgttttccttgaagttccatttcttgtgtggtaagtagtttttaaaaagaaaaggaaggccaggtagtggtggcagatgcctttgatcccagcactcaggaggcagaggcagaggcagaggcagcgggcagcgggcagcgggcagggggcagggagcagggggcgaggcagagagaggcagagaggcagagaaaggcaggtagatctctgagttcaaggccagcctggttggtctatagatggagtgctaggacaaccagggctacatagagaaacactgtctcaaaaaactttcaaaaaaagttaaaaaaaaaaaaaaagaagagctcttgacccgctcatttgattatctgaggaacagataatcattaggagtgagataaggggagctggcttttctccttcagagctgattttccgtaacctgattgagggcccaataggaaaaccctacctggttgctctgcatagttggcggggctttcataggcttgcaaagcttctgcagacttagcaatggggcagaaggcctggaggaggtgctggggatagcactcacccaggggtaagttgctttctaagtccctgtccatgtccttgtatctcagagacaagcccgttgaaggtacagactcttctctaggggtttccccctttagcagtgatctcgtttctgtatatgagttcttgatgtgctttgtatttctgtgtgtgtgctggtaccttcagggtgggtgggcagcattcagtctaaaccacaggagtatactggaattgtttctgtgggcctcacttggttccactctgtggttcctcccttggtgttggaggtagtcctcctgggagaagagaagtaatgcttttcttggggagtcagcagtgggccagacctgcaactgtatcctcaaaaagtgttgccaggaccaaatacctggcaagagcaactttagctgttattttttatttcagctcacagtttgaggggatacagtgtatcagagtggtggaggcatgcctatggcaggagttgcttctgcagtcaggaagcagagtccagttctggtgtttctcttgctttctccgctttattcattttggtttcccagtctgtggagtgacaccactcctgtagggtgggtcttccctcctcagttacgcttctctgaatataccctcacagtctggcccagaggctatgtctcctaactgacctcaagtccagccaaattgataatggaagattaatcatcataatgagcatgctacattctaaacacgaacttaagtgttttgaacaaaattttcataatccaaatgaagtgttccaaattctagtcagagatttggatgtgtatcttagtgtgccacagtcatttccttcctcacagagtgcagtgtgatgcatgtgctgtccggagtctttcgaaggaagacatattagagtgtgtagtgtagtggacctctgccctttcaggggaagactggtgtttgtaggaggaagttgcatgcaagtagtatttggagtcaggagtattcatggtatgttgtgtgctgtcttggacacataccatgcagtgattatattaaaacaagctcagtgataaattggttgagctttgtttaaacctaccagtttctaaatttatttaactaggcttctctccttaaaacatttcttttacttctcaaaggacaatgatgggtaaatattggtataaattctggccggagggactgcaagtgaagccttagtatctgtggatgcagacgtttttttcttttaagcttctctgaggaggctggggagatcgctgagcagttaaaggcaccggctgctgtagcagaggacccacgttgaggtctaagcaccatgtgacagcaacaatcccttgttagctgattccagggcatctggtgcccacttctttcttctggcttccagatacagcaggcacacacagggtgctcatacatacactccagcaaaacacatacattaaataaatataaaaaaaatcacactcatgaaaaatagtccttctgtggcagaactgtttttttttttttttttttctttctgagacagggtttctctgtgtagccctggctgtcctggaactcactctgtagaccagagtggccttgaactcataaatctgccttcctctgcctcccaagtgctgggattaaaggcatgcgctaccactgcccagccctgtggcagaatttagtgtagttggatgtggtggtgcacgcctttagttctagcacctgtgaggcagatcacacagatctctgagttggagaccagcttggtttacagagcgtgctctaagacagccagagctgtgtaaaatagagagagaccttgcttcaaacaaacatttagtcccattatgaacctagtgtcatggtttgaaaagtatcatggaagcactgagctgtgcctacagatccccctgtctttgccaaagaagacttgagagagcaaaatggtcccagaagctgcatggaaagagaacatacattttttaaaaaataaggcaatttgtctttgggtgtgttcagctggactcttttctccaggaaacaggcacatttggggggaaaaaaagcatcatggaggaggagggggaccagggagaaaagaaaagaggaaggaaatggggtttaagctgaggacaggcgaatgagagcctgctgcagccagagtaggcttgtcccccatagttcatgttagtggcttggtccttactgtggtgggaggatctctcagagatggagcctagcaggagggctttagtctttgcaggtgtgactttgtaagggcaaggtgactctgcaggcattctggcttctttgcagtggtcctttaattctttttccctcttgcacacacttgccatgatgggacttgctgctaggcctgccttgctactcaaaaacatcaggcaggcaaacctttgaaaataacatgtcgtggcattcgttatttctatttatacatagaaaactggactattgtagctgcgcaccatgggaagggggcagagataaaaactcacatggtggtagggtacatgaagatactaggagtgctccttcttaaaataaccaaacaactatctgtttcagaatgacttttaaatatttcatagacttcggtcatacaccaaacactgaataaactgttgtgttttgctgatgtgtgtcctgcctccggatattctgaaggggtagtaagaattttgatagaagtcactttgtcagagcagctgtgcggggttaaacctcctgtaaacacctactcttccctacctaccaccctcacttcaagccatacagatcgtgaagctgaacatggcaactctgaacatgctctgttatatgatcaaagttttcctaatgaagaacatgtagctgatttgagcagaatcaagcaggaacccactgtccccaaaccctgaagactgctgtcagtgccagtgcgatttgccatgccatactgggtagatgtctgctctgcgagagcagtttccctagtagctgcatccagcgaacctcacctgctacattttcttaggatggaggcctcacatactagtacaacccaccttgccttccaatctcagcagccaaggtttttatttcaccaaagaaaattgttaggtttggggagttagctcagtggtaaagagcaaaaattcttggttgggtcctcagcttggggtggcattgaaggttaggggtaggtgttggacaagacaaattgacaaaggaaagaaagaaagaaagagagagagagagagagagagagagagagagagagagaagggagggaggggnnnnnnnnnnnnnnnnnnnnnnnnnnnnnnnnnnnnnnnnnnnnnnnnnnnnnnnnnnnnnnnnnnnnnnnnnnnnnnnnnnnnnnnnnnnnnnnnnnnnnnnnnnnnnnnnnnnnnnnnnnnnnnnnnnnnnnnnnnnnnnnnnnnnnnnnnnnnnnnnnnnnnnnnnnnnnnnnnnnnnnnnnnnnnnnnnnnnnnnagagagagagactctaccaacctacagggcatccaattgtagtgttgagtccttacatcacctgcagggggatgacccctgaaggatgtcccatctgttcctgtggtgagataggttttcaacatacgtagttctgatctttagggaagtacttggtagatgttcttgatgaagaaaggagaaatggaaatagttcataattgaaaatttatttctttgttactggttttgaatatacagttaaagatgatggacacatcaaggattcccttcccttgctcacaaatgccaacttcacttggcgaagcccgaggtgctgccactgtctcctttaatttctgtagattgacaggtcctttccacagtggtgattaatatttatagcgattcccctggggacacacaaagtcctgtgactcatcaacagtgatggtttattcagcccagctttctagacacatatttaacaccttataattgtttggaaattgggcatcagtttgtggtcttttttctttgtggttctgtttgctaaaatgcttcccatgcccactcttttagttaagaaacggtagaaagctgcggagggacctggttcatctgtttgtaggttttaaactcgcagctggaacaagaacatgctggaaacgcctaaggtgactgccaactttgtctaaccatggagttaaacagtacatttttgggtgatgaataattaaaatgtgtactggaaaataattctttcgcccacatgttttgtattataaactaggacctgggccatcgtctgctgtgttgtctgtgtgtgtgctttcagcagggtcttgctgagttgctcagctgtgttgctggtttcaaactcttgggttcaagggctcctcttgctccgcatccctagtagccgaaagtacaggcatacaccacctacaccaccgcacccagccttagagtttccttttctagtcatagaaatagtgtgttcacacacgagccactctgtagtcttgctgccactgcctcaggccacatgtcacctgggctcactggggacacctctcccttgctttgagcttacttacaacttttcaaattgatgataatagtaatatttgtttatcatagaatgtaggcattttagccccatcacagtgactttatagcactatgtctgcgtcctcctttttaactgtcacatggtgtacctaaacagtgtaaccatcacttattgagtgcacagattagacacagtcgtttatattttggcctagattctgattccagctgccatagctctattactttgctcaaattactctacctctctgagctgtggtgtggagtactcgtataagtcaaagtgatgtaccctcgatagaatggctttgaagaatttcactgtctcactcccctggctacaggaatctgcggtcaagtgttggcagtatgggattcttccgagccccttctgttcggcagatagaaatcttcattgtctctgttagctgtctgttgcagtaacagatagctttccaacatttcagccagtgttttggaggctttagtccatcaccagtggttccattgctttgggtctgtggtggcccagcatgtcttggtgtgtttagcccaacaaactttcatgcctgggacggaaaacagagaacgagactatggtcccatagtcatcattgaggacatacacccagtggcccaaacattccactaggcctcactgaagagttaccatcttctgatggcctagctgactggccttttagccacaagggcctttgggtgatattctagatgaaaattcaaagcagtctgttgtgttcctgtaggccagtgaaggaggaaggggctaggaattcagcatggaattttcttttcctttcccccttctcctcctcctcttcctcctcctcctcctcttcttctatcttcctcctcctcctcctcttcctcttccttcttctcctccttatttccctcctcttacttctctttttcctcttctctcctcttcctcctcctcctcctcttcctcctccttctcctcctcctctccctctttttctcagtcctccactaattttttgtttttcaagtcagggtttctctgagttgccttggcaacttgctttgtagaccaggctggcctcaaactcacagagatccacctgcctctgccttccaagtgctggggttaaaaatgtataccaccactactcaactattattacaattgtttaaacccatagttgtccacatagatcagaggttggggccaaggtagggcaggtgagtatgaaaagcagccagaaaaggagagtggggacaggcttacgaacttcctgtctgggtgcagaagtgtggagagtgagctagtggcaaggctttagcactttgttgttctgagagctacaagcagtgtcagctcgaactcctagggtataaatggtcacaccactatttaatttgttgtcttctaggagaaaatatgtattctataaatatcttaaagaacatgcaggcattttcctcattaattaggagtactctctgcagctgagtggggttactaaatgcagttttccaaagggagcttggtttcctgaaagctattcttggtgtggcggataagtgcagctgttcatatctcttaatattttactttgagtcattgggtgggcggagctgcctagtgttccaaaagcagcaggaaggcaggttgggcttgtgcataattgactgagagatttagacagactcacattacgtaattgagaggtaaaaaaaaaaaacaacctatcatgtgcaagatctgggcaaatgtctttgcattggctttccctctattttgttagtggaagtgatatgttttaaagcatgagatcaggtcttttgggctgggcatgtagcttagctggtgaaagacttgcctagctacgggaggcacttcagtctccagtagcacagaaaccggccatggtggctcatgcctgtagtccagacactcagaaggcagaggcaggaggatcaggagttcaaggtcatcctcaaactatttaannnnnnnnnnnnnnnnnnnnnnnnnnnnnnnnnnnnnnnnnnnnnnnnnnnnnnnnnnnnnnnnnnnnnnnnnnnnnnnnnnnnnnnnnnnnnnnnnnnnnnnnnnnnnnnnnnnnnnnnnnnnnnnnnnnnnnnnnnnnnnnnnnnnnnnnnnnnnnnnnnnnnnnnnnnnnnnnnnnnnnnnnnnnnnnnnnnnnnnnnnnnnnnnnnnnnnnnnnnnnnnnnnnnnnnnnnnnnnnnnnnnnnnnnnnnnnnnnnnnnnnnnnnnnnnnnnnnnnnnnnnnnnnnnnnnnnnnnnnnnnnnnnnnnnnnnnnnnnnnnnnnnnnnnnnnnnnnnnnnnnnnnnnnnnnnnnnnnnnnnnnnctgcggcattgggtgagctagctgggacagtgctggagagctcccccctgggtggggtgggttcagtatctaacccatctatgaactgctagagtgtgataaaggcggaggccttccagatccaaagctgcagggcctccatgacacagggcatcaacaggagatctgagaggagtcctggtgaggatgcagtactggtagtatagcaggagccagaggcctcgaaccagaccagtgactcattgtggtgacgatgtgtggacagaagggtgcaccttggagtaaatgtactgggacccactgcagcttccacagcaaggtgtttttttttttttttttaatctttgtttatttaattttttttttaagatttatttattttatgtatatgagtacactgtagctgtcttcaaacacaccagaagggggcatcagatcccattaccagtggttatgagccatcatgtggttgctgggaattgaactgaggacctctggaagagcagtcagtgcacttaaccgctgagccatctctctagccccttagtttttatttttatttcttcttttcttttgagggaagtgggtgcagaggtggatggtagatatggagggatggggagatgagtgagacaggcgtgcatgatgtgacactcccaaagagtccataaaaagttcagataatcacagaagagcctgtgctttgtggatgaggccgtgagtttggttcctagcaccacacacctaagaataaagagcatgtgtgttgctgtgggctcttgtgaccttgctttcatgggtgattatagatgtggaaaaggccacccctcccaagtacttaacggagtttcatcataatttccccgagttcattacaaggttgaatttttctctgtcctgtatgttcatcacttgggaagagaagtatttcttcatgcaaacagcttttggctagggttggcctgttctgtgtagtgaggaggctattggaaggcttcctgttgtaagattccagctgcccaggcctggcttgggaaatcatgcttaataagtcttaaagtctcttctaggaagcagctcggatccctgtgtgggcttcagtgttgcattctgagttatgacgatgcaaactgtcagagcagtggcttctggtatgtggtttccagggttactgtgtgatcttccaagtaagggtttaaaaacagtcatctgtttttcctgggagaagtttaaaagtgtctgttaaaaatcatgtgatctgagtactaaaagccttaactcaaagcaggatgatacaggatccctgcccctgccgggtgatgaggagaggggcctggtctcagttctctacttctgatctcaaaatgtgagccagtgcctggtaggctggtaggcaggtgtaggcaggcgtagggtggagctggctaagccccttggtagaatggcttgctttatgcattggatggtcctgggtcagcacaggctggaatgtgaatcacctgggagtgtgggcctgagaaccccactgtctgctgactcccagctcagtatgtttgcaatgtgagcttgggtaagatcctggcctctctgtgccccagtttccctcagctgtcagatgaggggagtattcaaaggtggttgtggtaatgagatgaggtactgtctctaaggcacttatgacagaacctgataagaacttagtcttacattggtacacctgttcttacaactttgatataaattatttggtctgaccaatttggtagtctattcctgttctccattcctgacctcatttgtcctgggttctagctgcaattttaagttcaccaggcgaggtaagcgaggactcttggtgaaatcagaattccttgccttcagagccagtgtcatttgacagctgtggcttgctgaaggaatgaatgtgtgtgaagagcccttggcctgggttcgtgtctgctttagtgctttgagaccacagccttcggaaacattcagagttagttacttttaaccttcatgtcctccaggtttgtttgtgttgtagcatgagagcacctagaagttacagagcttttttgggtgggtaaactcgcataatgcctttttagcagtcacttgtgtgtgtgtgtgtgtttgtgtgtgtgtgtgttctcctcaggcttgcacaaaaaggcagaggcgatagcatttgttatttacaaagttcctcaatggcacttatttggtggttttcatgccccataataggttaccacagttctttcctccttgataagggaggtgcatgcctcaagtgcactcacacatgcactctcatgcctcaagtgcactcacacatgcacgctcatgcgtgtgctcactcgtgcgcgcgcgcgcgcgcgcacacacacacacacacacaccagagagagagagggagaaagtgagaatgtatgtgaatgtctctctgtgtgtatatatatatagaggtagagtttgttgtcatttttagtagctctgcattttattgattgattgattgattgattgatagattgagacaggctctctcactgagactgtagctcactaattgggctagattggttggccaggtagctccaggtatctgcctgggtttaaatcatggctttgtggctacaaataaactaagaagtgagccttagtcttctgtggaacacgagctctctgcttcctcttgtatctaggacaaggatgtaaaacagcttgtaagatgcaggacaccttggtggcattgttgagcctaatagaatgcttactgtattgtcttgagtgtaatgcatttgtttggtccataccactgctctgctacccatcttacttagtagggaaccgatgtacagaaaagtgcaattgaacacgtgacattagacataaaactcagacttgaatctaggtcctgaatgtcagcttctagtttccctgatgcagaagttttttgacaatctcttatacttctgaaaaaaagcttctaaaagctaccttttctggtctttaaggtctttgcatagcctagcactttgcatgtattgggcacattgtcctctgtagccctgcccctggccgcagatgcagactgcacagagaaagttgacccctgcgaatgtcattggtggaatgtttatagattttctgttccagcaagaggccttgtggtgttcccacagacagccggcagctgaggaatccttgtagaatatatgataaatggtgaaagagaggctttccagaccccttgcttctttgcttatgtttgtttaagccaaactaacttggagctgcactgttgctgctggatctgataggaagcagccgcttggagttgggagtggtgatggtttgggggagcttggggacctagactccatctaaacacaggcccactgctgggaggctcagagcatcctgagaggttgttctggtccccaagggcagtgatactagagtagaggcggggtacatcctttacagtcaggagcttctcttccctgctggctggctacggccacattgcgattctgggtctatgagcttgtctgtattgatcccaggccggtttgacttggtagcagtgtgctgaggatgatgcccttgcagctgtcacagtcagccaccttctgagggtagcacacagcgctgatgtcaaactgctgatcctggatgtgccagagttcttttccctatgtgtccgtgtctccccagctttaggaagtcgggttttcttgctttgccagttgacttcatagctgtgtggctggatgagatgtttttcaaacttgtcctcatgttgaccaaaggcttggagatgtagccttctgtcaggcaggcagatgcctaattatgagtcaccgacagggctgtaccagtgactttcttcacacaccgacagcctgtttctctcactagcaggacagatagtgaggctgttaggggagtgtttctcacctttgaatccctcccaggagtgtatgggcctctttgccttgtctcttatggttgttttgtgtgtttttagaaaattcgatttaggcaagaaagggtcttgagaagttgaaatcttggaactagaaaaggccttttggggctggtgaggcgtctgcggtgaagggtgcctacagttcttctggttggttcctcaggcatgtcaggtggctcataaacactggaactcttgctcctggggatctgacacattcctccgtgggtatgtgcacatgtgtgcacacacatgcacacacaaagagaagttttttaaaggactttgttggtccagctagtgtgtatctgtgtgtgcgtgcgtgcatgcgcctgtgctaaatagagtaagtacctttgcgttaaatcccacctgctttctgccctgtgttccttatggcttggatggagatggggatctttcataatgctgaaatggggaagctcccattggaaagatttgttactgttttcaccaagaggaacagaatgacctgaaacatggatttttatcttttggccttggtttcagcatttaaaaaaaattgatttttttttttttttttttttttttttttttttttggggttgagtgtcagtgtgactagttgctcaagagtctagccttgaaagtttgcttccgggcagcagtggtgaaaggtgttggatcactctgacccccacccatgggttaagcattgatggactcattgcaaacagaaggttgggagacggtaaaaactgggccagtgggacatgtgttgcccnnnnnnnnnnnnnnnnnnnnnnnnnnnnnnnnnnnnnnnnnnnnnnnnnnnnnnnnnnnnnnnnnnnnnnnnnnnnnnnnnnnnnnnnnnnnnnnnnnnnnnnnnnnnnnnnnnnnnnnnnnnnnnnnnnnnnnnnnnnnnnnnnnnnnnnnnnnnnnnnnnnnnnnnnnnnnnnnnnnnnnnnnnnnnnnnnnnnnnnnnnnnnnnnnnnnnnnnnnnnnnnnnnnnnnnnnnnnnnnnnnnnnnnnnnnnnnnnnnnnnnnnnnnnnnnnnnnnnnnnnnnnnnnnnnnnnnnnnnnnnnnnnnnnnnnnnnnnnnnnnnnnnnnnnnnnnnnnnnnnnnnnnnnnnncagtataactgggattttggaatacggtgcttgcatttttctagtgcactaccactttgacctaataaatgagatctgttgtgactcgggctgcttgctcacatcctgccaagaagctaccatgaaaatgctgctcaaaagttgctgtcactgtctaggtttagtggcccagcattcaggatgcaaatgcaaacagatctctctgagttcgaggccagtctggaccatacagtgagttccaggccagctggggttaacatagtgagaccctgtctcaaaaagaaaaaaaaaaaaaaaagagttgctgtcaggcaaggcagggtagctcacagctgtaatgctaactccatggaggctgaagcaggactgaagcaatgacttgagttcaaggacagcctgatgcacccaagagttaatagactcatgtatgtgacaatgtaaagcttccttgtcgaaggatggacagacagactgactgaaaggccatcaataaagccagccattattcaggctgtggtctatccagtttgcagcagacccttttctgtatgtcaggatgcaaaccctagagcagtggtttccagccttcctgatgctgccctttaacacagttcctcatgttctggtgaccccctaagcacacagttatttttattactacttcataactgtaattttgctactgttatgaatcccaatgaaaatgtctgtgttttctggtggtcttaagtggcccctgtgaaagggtcgttcaacccccagagggcagatgaccgtaggttgagaacccctgccctagaggactgggcacttcatagtgcttggcacctgcttttcccaactgttcacaggccactcactgctagttgaaaaatgtcattcctgggtgtatagccccagactcaaacacaaggctcctggctgcctctttttttctgacaatggacttgatgcagtctcttgaaatctctgccccgagggtgcttaatgctggcaccttgctccattgccattttaactggtgttgaccaagtggaaatggaggttacttcaggtgagttcaaaagatggtgaggacattcagaggggtctggaaaggttttttttgggtgacaaagtctggtctggttttgaaggacgggagtggagaggagtgctctgaaggcagagacggaagaggaagtgcttgtctgctctggggactgagtaggtgagccctggagctcgtccacaggacaggcattcttgccttcctcccagagcttctgctagccccccagcctgtttctcgtggtccgtggagtaactggttctaacaagttccctggtgatgtggctgcttctggtctgggggcttctcttagaaaagctgagactggggtagggtcagtccgttcagcagacagcctggctgcccacgcgcagggtcaccgcacgcgtgctcccttgttgtgcaagcactgactctcaggagtgggcactcctgcatgggtaccagaagccagggatggcttttgatcaggggagatggctttagttccttacagaagcgagtgactgggaatggtcgaagctgaggggaagggctgtgactgtaattgaggtggctcctctccagagggcatgctggtgagaactgggcgccaggaggaacagggaaagaggaagcctgtcccaggtggcctagcatttcccggagcttggagcctggggttggggatcctgtggagcagaagcacgtcagtttttaaactgaattcaagtagttttcttctgaagaagttactatctaccctgtgttgtagacagagctccctgtaattttctctgcctttaaattgtccccttcttcccctttttgtgagacagtctcattgtctagtcctgtattggtctggaactcactatgtagaccaggctttccctgccgctctgcctcttaaatgctgggattaaaggcgtgtaccaccatgcccagccttttaattgctttgagtgtctaagctttacaggagtctgaacattataatctcgtgtttccaacttaatctcctgttatcctgaagtttaaatggaaggagatacaaatacttacctaaaaccatcagtcatttcatggtaattctctaggtccttacgcctgaatagtcttacctaactcaaaatgagctactatggttacagcgtcagcactgtgcctggctgggacaagggtgcagtgtgctgcacagtgtcctgtcccgttcccagttagtaatcgtttgtcatgcgtagtcagtcatagatgatgctacttagtctcttccctgatcatacacaattatttagaaaattgggagcctaagtatgagattgagaactaacacttggtgataaagtgtgtatttagcgtgtgtgaggccccgtgttcagtccctgacatgggtcatgtgaactccctgtaagttgcggctagagcattggcttttagtttggtcttccctgtggctccaagtccttgaggagcgtagtggattcgatttaggattcttcagtaagcttgtaggaggagttaggtgacagatgcactactaaccaggttgtgaccgcatgaccttcctaggagggaagagcctgtcagaagcaaggggaagggaggagtgaggttagagctgatagaaggcatgcttgtcacaaaagtcacttggatcagacttctgcaaggagaagcctagaaatgctcagatgaactgctcatctcaccctaggggaaaggggaagtcactcgcctgttcttcggagagaaggaagcacttgaagttgtgacaggtcagcctcttgtggctggcagcagccaagaagcggaagatcacagaccacagaaaaggcagcagggagaggcttgaggcacagcagatagcccagagtggtgccaacagcagcatgttgtcctgtggcagaagtcacagctggagcctatagggaggggcagggcacaggggacccacaaggtctgtgtgatagccctgcctccacctttggggaacaaaggaagggtttccatcttagatttgacatcctaatcctgatcctgcaagaacttaggaacaattgttgctgatcttaggacagagaacccaggcaggcaggcgctctgttcctcattacagactcagcttcttaggtgtttaaatgtttcattaatagggcccgtacaattgtagcctaggccagccttaacctcttttgaaatttttaatttaatttaataatattctgcccttctcctctcagtccctctcctccttttctctctctctctccctctccctccccctcccctcnnnnnnnnnnnnnnnnnnnncctctcccccttcccctcccgtgtgtgtgtgtgtgtgtgtgtgtgtgtgtgtgtgtgtgtgtgtgtgtgtgtgtgtttgtgtgtgtaaggcatgcacatatctggggcacatgtggagtcctgttcaccttttccaggatcaaggctcatgttgtaacagtcacttttacttgctaagccattttggcagcccaggctgtggactcttgagtctgctgacttgctgagcatggaggaatccctaccttttgtctacactgggctgctactcagagtgggcatgatatgggatctcccttgctcccggggtctttaaacaagacaacagtaggccttgctctatcaagatgattctgacatggtaaatattttactaaaatattattgatggcttgtgattcatcttctggttgtaccagagtcttcttaaccaattggcatgaaatgactactctagatttcctttgggccatctgctattgtaattgagagcaaaataagtgtctggttatttctggttgttgaagccaagtgctgagaaatagagctctaggtcacatttgtatactttcttatgtgtatctccaaagtctaggtactcgttttaagtgtaatttctgaggtacaaagctggctgcttggcgacagttttgatgtcctataaaatagttttgaaaagtcactgggtggttttcccacttactttttttatgtgacgtgaagtgaagtgcagaggggtaagatgctgaagccatggcttccaatgtgtgctctctctgtctctttccctccctctctctttccaccctcctctctttccccctcttcctcctctccctctcttcccttttcatttctttccccctctcccctccccctccctcttcccccttccccctctccttttgaagtgtcctgtaaagtcctgtggtgactgggttaggaaatgtgttttgcagtatgcagggtgcgggcatagatagatttgaatctgaaattattgttctttgtgctgtctgtacagtatggttaaaggatcaagttttgggtgtgttaatcctgatcatgaggagtgtgatttgtcatgacttcattgaggtatgacatcatctgagaatttctggtggccttttttgatgtggcacatagattgggtcatgtgctagaacaagcacatttccagaagtgtgttctttctttgtggtcggccagtctgctcttcctgagagaatattgtggcagtggctatcagtaaaaggagctctccttacttcaccaagccctgaggctacggaatctgctctgggagcgagcgagcactgtgtgtagtaggtcttggggtcacatggctggaatgtgcttgaaaagccgtgcgctcatccctactgatatctaattgcagcatgcctgctctgtcagagatgcccaatatagaactagttatgacttgctcagagcgtccaactagtttgcaagcaggaaagaagaaattctgggaaatcacatagagacttcctggtagtttgagtgcattcttgagttatttgaagatgcaaaaggccaagggaaggttttgttatgtatgacagacacactgtagttgatctccagatggtaaagtgtgttgatagttttctcctgagagttgaaagctaaagagaaagaacaacatgtactggggacttgaacccaggcctctgacgtctgagatgtgtgctctgttgctaagctgcgtctgagtcccagctgctttccaaaggctgggattagcagtgtattgcttttaggatggggatattgtaaacggagtgttggtgattaaggtactccttgcacactcttgaaatgggatgcgtgtgtatgacatccacgaggcaaagccatcaaaatataatttcttccccacacacatatagttgtatgaggtgctgtttctctttaatcctaagaaaacactcaccctgaggaagatagaactttgatcttccttctgtctccatttgctactattagtcagtgcggacagtgggccatcatttcacatgtagacagtgtggtcagtgggccgtcatttcatgtgtagatggtcagtgcagacagtgagccgtcatttcatgtgtagacagtcagtgtgaatagtagacggtcatttcatgtgtagacagtcagtgtggacagtgggccatcatttcatgtgtagacagtcagcgtggacagtgggccaccatttcatgtgtagatagtcagcgtggacagtgggccatcatttcatgtgtagacggtcagtgcgggtagtgggctgtcatttcacgtgtcccatgaaatgctcagtttaggcatcatcatggctttggctcataggtgactattaaatgccgattatttccttaacctctaggtatgcaaaccacgtcctcttttcacaatttatcaatgaataaaattaagtccagttactaggaagaaccgtacaaactccttttacaggacaaacttgttttctattgttttgaaaattgaggttatgggctggagagacagctcaggagttaagaacctttgttcttacaggagactcaggttcaattcccagcagtcacaagtgtgtcattccagttctggggagcctgattccctcttctgacctttgtcagtactgggcacatagctggtccacagatgtacatacgagcaaaacactcagccacataagataaatctttttaaaaaaaaaaagagccaggtgtggtggcgcacgccttttaatcccagcactcgggaggcagaggcaggtggatttctgagtttcgaggccagcctggtctacagagtgagctccaggacagccagggctacacagagaaaccctgtctcgaaaaaccaaaaataaataaacaaataaagaaagaaaattaaggttagtccgttcatgtttactggcaagactttgcttcctattttatcctgttcaaagatggacagagagcttcatggactcagaagtgtagagctttgaaaggggaccggaagtaggctgtggagtagacaaagctggggagcctgcaggccgcctcctgtcagataactgctgtgtgttagtgccagtaggtgacaccaggtggtgtgaatctgcaacactgccattcaagttgcatccccagtggcctggccctaaggacggaggccccaaggactcgggccgtggcctggagggtggaaagagctgctgcttctctttctggttccttcttcttcgctgaaccaggatactttcccttcactaggaaggattccaggacacagcagtaggaaaaaacgttgtaatatttgaagccagctttcatcatgtcctcctgagtcccagcttcattcctggtattctagtattcggtatcagatttagccatattagggagggctatatttaaaaacaacaacaacaacaacaacaaaaacgggtctgagcctgacagcgcacacttgcacagtgacttgaaaggccaaggttgggtggtcaccagttgcaagtcagaccagcagacacagttcacatcttactgtctctctgtgtagccctggctatcttggaactttgtagaccaggctggcctcaaactcagaggtctgcctgcttctgccacctgagtgctgggattgaaggtatgagacaccacagcccacatcttatttgtctctcactgttgtcttgacctctgtcatctgccttctgctctgatgctgtccccactaaggtcacacctctgacctccttggacccagtgctgtgcacacctgcagcttggcctcagtcctcagctggggttggctgtattgtaagtcactcacttggtgtggagcaggctcttctctgtccagaagggctcggggtgctgatcctggagcccaagtagtttaatctttggctcactagtcttacctcctcaggcactaaccaagatggaagctgactaggatgtaatagtcttctggagccgagagagttatttgaggcttcagggtcaggtgtggtagctttcaggggaaatactattgaagttttttctttccttaagtagtacctgagagacacttagttggcacagaagacttcagtgagtaaagagaggtgtaaacaggattaagaaggagtttcgacactggaaacctccagagttttttactcagtggagggagggagggaggagccagagcttggggaaggtaaacagggaccagtcagtctttggcctgggtggagtgagggaagggcgggcctgagcagagccagtggctggctgggagtgaatggctgctgaggaatttggggctgagttccccaggcagttgaacaggacccacgctgctcaccaggaaggctaatcttgtagtagctgggtaggtggggatagaatgaggtaaatctcattttggtctcacctctagggtgttttgtctgaagggccttcttgttcaagttcagtggggcctcctcttaggaccatttccctcttactccaccagggcctcctaggctcgcgaccagtgaccactgtgtgctcggcctagggagccagtctttacagctttgactgttctgataacaggcacacagatagtagtagaatgaccacatttccttcctggcaacacagccttgaccttgggatggtgagaagcacaggtctttggggaactctgagggctgtggtttaggaagtacatggaaagcgtgcctttggtaggatctgaagtaaagtataaggcaaattgagagagtaaagtttagacccagtagctcccttccataaaacttgataattcactttagactttactggctgtttgacacgcttctttccttgtctccacgaacctctacgatctcaaaccagggccgccttctttggttttagagcaggcacctgacaactgaagtatccaagcgtgagaatgctaaaggtactctggctctgcaggtcctgaggagccacagagggcagacacgcccacttcacttttggtagtcttgttcttccctcctcgctgtacacttgggagtgttctttatgtataatttgagcaatggctaataaatgccctgcattatcttagcagatgttttggtaagaatgagaaaatgagtcctgaggtacttattgtgcgttgtaattaccagtagtctgggcagttcttatgacatcaggaaacccaggggtttttcatgcttgtttgctatagatatctctaaaacatctggacagtccctcaaatgggatgatcccaggccacggttggtgtcgacggacgcaggcctgtgaggccgtgaggcccgtgagcttctgcaggagcggggactgcttctcgcagtcgatgacattctcactgaaccaaggacacaagtgactgtaggacagtgactgcctttcggagggtgactcctcctcttagaagctctacttgtttgggagaaagcccagggacgagctatttttccaagaattgtttatcttttagttttgtggaaactgacagaactgccatcctaaatttagcatggtgtaattttccaagcaatattttgtgaatgtgtttttatacagttgagtgccatgtattttaagcgagaggtttagacatgcctgatgaatatagtgttccttttctgacataggaggagatcttgggtattcgggccaggctcctgctttctcacagcttaggcagataaactggtctacatagggccacatagttagatgacggaactcggcccttttagatttcctttcccattagagacctttccctaaatacattataggtttagtacctgaaacactgagatgtccttgagaacagagcttttactggcccagaagacaggattcaagtgacatgggggagtcttcggtcgtgctgaccagggagggttcccttctttgttcttggattttactatgtagctcaggctggtcacttctgagtctctggagtgctgggattatagacatgcactcttagatcaagtcagaagtttcccttagtgcttcagaaaggtgtgttatttatgaatggagaggtcttttttttttttttaaatcctaatgtcttagtcaggttggatctataacaaaataccacagacttggtggggtgtggcttaaaaaaaaaacaaacagtttcaggaggttgtacttggtttgggatggggcctcttattttctgtgtaaggatactaattccatcatggagtccccactcacagagtcatcccactggggagaaggggtgtagggcttcaacataggcattttgtgggaacagagacatttggtccataatactgagtaatgctgtttttgttttgttttgtaaagagctgtctagtcatgtgtggtctcataggcttgtacccacgtcacttagcaggcagaggcaatgagctcttgagactgagggcagcctgggccacatgtcaaggagcctatctcaacaataacagcaaaaaggtgagcaatctggtgcaaaggtgattctttggagagtcaatgtggtgtgttattgataaatactcatacagatatgtaaacacatgattacacatatttaaaactacttggagatgagtagatgagtgagtcttttcctaactgcctgtccagttctttaagcagatacttggttcggcctgtgttgagagtgtgctatggagcccacagttgctgcctagtactgaagccatggaccagcagttttcttctgtcttctttcaaaggtgcctttttatcaaattgcatgaattctttaattttctttttgatagaccattttagcacttgcatagagtgttataatgaattcctaagttctcacagatctaaacatttaaaggacatgtgtccagagatgatcttaatgtatgaatgaacaccactccagattgaaggcccctgtaacttcccttctttctctttctagaaggatccattatcttagatttggaatgtagcattgttatgcatttttaatacttttatcacacttatatttgtaagaaataaatattctaaagctttatggaagtgatagcacactctatataagagaaaaggccatgttttgaaaattgtctcattttgatttacttctgtgtcatttttaaatgtatgtattccatcccatggttattctatagtgtgtgtttacctgtgaggtgttttagatggtttccaaattttcactaaggttcatagaagtactgtgggtatgtatgcttgcacaaagctgcagataggcacagccgagtgtctctggagacctgcagctacgctatagtcctgttcagttttactccattcatttacatagcctgtctgtaaccccttcaatgtgatgtcactggccagtgtcttctcttatacttaagattaaatatctgaatttttcaccaattgttatgtatgagcttattgtcctcacttgaatatagaatttgcccgagagctccagtagttatcttttcaaacatgtattgatctttcagttgtgtatgtgtgtgcatctgtgtgttgtgttgcactgtatgtatttgtttgtatgtgtaggtattgtgcatatgtgtgtatgtagaggcaggggaggtcaaagggcaacagtgggtgttttcctcaatgaagtctcacagtgtgtgtgtgtgtgtttagttattttatgcctgtgtgtgtttggtttgcatgtatgtgtgtgaaccacgtatgtacgtggtatccatggagttcagaagaggcaccaggtcctctggaactggaattgtgaatcgtatgagtgctgggaacagaaactgggtcctcttcaagaacagcaagtgtgttgtggtaaatattaaatgccggttttcccccaccgttgatcatttagttctcagataaaagacaaagcctctgtagttacgatatccttaatagcactagatctgggcagatatcaaccctctacttccctatcaataaccctgagatagaacttgccatgttctgtctgggctgctcttactccagctggctagccctcaggaccatggtctcacgattcacctactccatggcgtctctctttccttggggtctctgcctcagatcccaagctgggctactgaagccccccttcctctcttctgctcaactattggccaccagtatctttattcaaccaatagttttaaattaaggagcaagtttacatagcatcacttagtgatggcctcctcattcccgaggcaaccagaccttggaggctagtagttagcatcacagtactccctgggctgggattgcagctgtgtaggttactctaccctctcttattatatcatagagatcagaactcaggcccttatgcttttgttgggggtatctccagcctctggctcctttttggtttgcatgtttataatgtaatggagtgactcaggtacagagtgacctttgacctgcgacccatgacctcagtcagtgacctttgacctgcgacccatgacctcagtccttgctcactttttactcacatctgcagttgaactccactgaaactcagcaaaactgtgactgttacgaagcgctttacccgcttcacttctttgggtccactttctcagtctccatgtccatctgtactgtcttggatttcattattccttgtctggttttctgtggttgtaaaatctcgcttcaaaaataatttttaaactatcttagttgtagtttcatgacccccccagttcatttataaaattatattttgtgacacaatgtgtgtacgtatgacacagaaatgactcacagttgttaaatattaaaaaaaagagcagaccaacatgggtatttaagaattccagcataatagatacttttccaacttaaaaaagtttccccctacatgaagtgctttatattttgtgtttgggcatgcgcgtgtgtgagtatatcccctccactgtccgatgcttctctgatccgtgttggatgcttctctgtgtgttgtatttccagaagaaaagtagcttaaacggaagcaaataatctgacttcgtacggagcagaccacccaaaagtcataaatactaaaggtgctaacgactgatgccatagatctttcctgttcttttaagttcttatgtgttctgggagtgtgtgcaccaagccactgttacctgagccagttggagtcactggctgggccgttgctattccataaaaggccttggggcacagagatctaagacaggccaggttggggggcggggctgtccatctagctgcttgttagtgtctaagtctcgtgacctcagatgttgacttgagactccagatgtttcacgtaattatgtcctgttccttcatgcattgtttgttctgttgtaactggggcaaagtgggaggctcaagtcgtctaagcttgcttcatgtacttcataagaatccgaactgattactgtcttgtcgtttaaaaggataaagccactcagccaaagaagcaggtagggccttgagctgagcaggtcaccaccaaaagagccaagcatggagttaggcggagtgggctttctgcaaggctacacttcagtcaggagctccttggggaggtttagttgaggtttagctctgtagtttgtaacctcctcacctagtcatctgtctggttttcatctgcgtgcagcatataagccaggcctggtgtgtaagccttggcagcctgcaggcattatgacctcgctggctgagcgccacactgccttgttcagttttgcctgtgatagagggctctgtgtttgccgagtggactccgctgcacagtctgctttccagttagcacaactctgttgattagttccttcaggaatggatggtggacacatgtcatctagatgtacagacagtactgatatgggtatctttttggctgtcttcccatgtgaagccaggccttactcaagccttgcatttttttacttttttggaaaaaaaaaataaccgtgcgtgaatgtgtgggtacacttactgtggtgctggggtgggcgctgcagaataaatccatgggttttcctccactgtgaagtgggcgtcaggggtcactcctcagtgctctccctgctgagccgtttcttgtcgaccactgttggtataacaaacctagttgtcccaccttgttcgttgcctgctgttagttgcctgctgactttggttcatcggtttttactgctggtcaccgttctcctgagctaatgctgtcagtgtggacactagggctgtgtaagggatagttgttttatggacattcctttgaaaacagatgtgagcatgtgcacatgtgcatgcgcctgagtgtaggcattcccctgccgcagcacccctgtagagatgaggtatcttgatgctttagataccaggctagatggcctttgacctgggagagtctcctgtctccgtctcctgtctcaccataggaactggggatctacagtgcccagctttccttgggttctggatccaagctcaagtccttgagcagtaatatatattcatgtgttatcatatagtacattaatgtatttatagtatatattgcatgcaaatatataaacataaataacatataatccattaatatagttatataaagtatgattctatagtaatatattaatagattatatttgttatattatatacacatatatctttttaaaaaagatttatttatttatttatttatttatttaatgaatgaatgagtacactgtagctgtcttcagacacaccagaagaaggcacctgatcctgttacagatgggtgtgggccaggaatgggttgctgagaattaaactcaggacctctggaagagtagccagtgctattaacctcttaaccactgagccatctctcaacactacacatatatcttacttgccataatcaccatggcctgtcatattacttgggtcagagaatgctcaatgaggtattctgatctgatgtttaactttcccatactaatttatagttccataagcagtacatgagagagcaggctactctgaaatttcttcctagtgcatacttaagtttatgtatgtgtgtgtgtgtatatgtatatgtgtgtatatatatatatatgtgtgtgtatatatatatatatatatatatgtatatataaaatcatctttagcaaacgattatttttggggtgtgaaatcataacaccagctgtggtggagaggtgggcagggcacaggtgaacctatactgcatgccggtagaggctctcagtgtttatgggaagacgcggacacttgttgggtggccaagtgatctggtttacatcaccagtccttgctggtatttgactctcagttcgtaaatgcccttttacatttatattctctcacagggctcttgcttacgttcacagtgtctataaagccctccgctcttcagtctatttcattctttgtgggggttttaacttgtgtgcttttgagttacagattatgaacttgtggagtgttgttgggggctggaccaaaggtgttttaaaatgtagatgttttgttttccatgataaggcaatattatacaataaacatcatttggagtatgctgttgtgattattaaaaaaagggggggggaaggggagttggagagctggctccgcagctggagagcactggttaagagcactggctgctgcgggctggagagatggctcagtggttaagagcaccgactgctcgggcatataaagtttgcaagtccagtgggcctctctttgcagtgatggccgactaggccatcttttgatacatatgcagctaaagacaagagctcccgggtactagttagttcatattgttgtcccacctatagggttgcagatccctttagctccttggataatttctctagctcctccattaggggtcgtgtgacccctccaatagctgactgtgatcatccacttctgtgtttgctaggccctggcatagtctcacaagagagagctataactgggtcctttcagcgaaatcttgctagtgtatgcaatggtgtcagcatttggaagctgattatgggatggatccctgcatatggcagtcactagatggtccatcctttcgtcacagctacaaattttgtctctgtaactccttctatgggtgttttgttcccacttccaaaggtcctgagttcaaatcccagcaaccacatggtggctcacaaccatccgtaacgaaatctgatgccctcttctggagtgtctgaagacagctacagtgcacttacgtatatataataaataaataaatcttaaaaaaaaaacaaaagcactggctgcttttccagaggacctgggctcagttcctagagcccacacggcagctcagaagagtgtgtaactccagttctcgaggatcagacatctccttctgggccctgtgggtgcctgaatgcacgtggtataatgaaatacacttaggtccatacatatgcacacaatataacatatataacatacaaatcttaaaaaagaataactccccagaatctggcagtgaagaaataatgtctcttctgggagatgaacttacactaccattcgaaactaaattctcggggtcctaagtacagagtcactagaaaggctgggcctttgctcatagagacagtatacctcatcagcactctgttagccagagatgcagagccggctgtgagcacgcaccctgttgactcccccttacctcttaggttccataggtcataacattcaatttgtctagtaacctcctggacagagaattaacaatggagcaatcagagctgtcgatagttagatagtgtgtgcagaagcagatctcaagtcacttgtgtgcccttcccttctcagcgagcttcctcaggaacccggtacctcttgcctctgtagtttgctgtgatgtgaacaatgagtgaagaaaacaagtcacaacactggctacttttctacccacgaagcagcttcgggcagcttcggttgacaggctgtcgttctgtgagacagtctgcacccgcagaatggggttatcaagcccctcttgagtatgcggagacctccaagagcttgatgctttgggattatggggtaggggtggacttagacataattattggtgcaggttctaaactcaatgtcatagttaactcacccagtggctttggggtcacagggttatggtactgtacacttgctaagttggttcaaacagtgctttccaatatcagccgttggccagattgtaagaaggcctaatgctaattctgcagttacttaattcttatagcataattttagttcatacagctcagaatgcagaagactttataattatccctacttagaaaacgtcttcctgggcactttacagtcagagaagggcacttaagagcatacgcctggtggaatcatattcaacttcggtagcctgaacccaagacaaaaacagatgtgcttgaaaatgtgaagtacatatttttttattacacgtgaaggtgtactgtctacatgtatgtctgtatgccacatgcatgactggtgccgatgggggccggaagagggttccatatcccctgggactggagttacagatggtagtgagctgcagagtaggcgctgggaattgaactcgggagctagtgcgcttaactgctgagatacccttccagcccagtacatactctcccgtcatgatgttgagttcagttttccttgggaggcaagaacaaatgtctgcggttcttaaccttcctagtgctgcaacactttaatacagtcccccgggctgtggtcgtgagggtccacaacgccctggactccaatatcaaataggatgtaaacgcaaagagtgttttgttttgcacaagtccagcatgcgaggggtgtgtgtgtgtgtgtgtgtgtgtgtgtgtgtgtgtgtctcccattaccagaatgagtgacacccaagtgagcttgcaggcttgatttaaagcacattagggaattccagggtaggtgacctctaggttaatctatctgttaattccatctctgcctctacagacattccattactggggtgttggggctggacacttgctggggaggtctggagactgttgctgaggaagtagctgaggaagtctgcaaactgcagctgacccactgtccttgcctcgggccaggttctgaggcctggatttgcctggaattgcccagttcttggagacagagatttaggcctagtctccttaactgcctacctgaagcctgtcatggaatcagcccagcctctcagtggtgacacccagccataacattattttcattactatataactgtaattttgctactcttatgaatcataatgtaaatatttgatatgcaggatgtctgatacgcaacccctgtaaaagggtcatgtaaagtaaaagattattaagttctgtatatattaatgctggaaattaatatgacagcaattattccttaactagcttttccccaaataacacagagaccttttaatatttcaaagccttaggctcagctgggcagattctcaacttactcatctcagttatcccaacacctagcctcatgcagcctcgtcatgagcaataccttccaggcctatagtcacgtccatctcctctcatgtctcctggcaaaaagctttcctcctccaccttcccagggttcttttctccctcccaggaagtcccaccttccacttcctgcccaactaattggccatcagattttttattaaagccaattaagaaatgccttaggtaggtgaagaaggacagagacacaatttcacaccgccctgtgtactccaacagggttctaccccaatgggtcggatccacaagctgagaactgctgctctccatagagcactatcaacagaccgaagtaatgattccactcaagtccagcttgccaagccagtgagtttagaggcataggtggccccacagcagctgcatcgctgtcagtgcaagatgtacaacagcttccccataaccacacaagtgagagcacactgtcaattcattgtatccctgcgtgaggttgtgcctctctagatcatgtggtccttggaccagatgacctgcaaggaggaggggtgtcagtgcaggaggaaactgagtaggtgaaatctcagaaagggtctcatgtcccttcctgtcatctctcactgtaagggacttggggtctgcttcgttgagggtcttggagtaattacagatgctgtgattaatatgaaaatggctaccatgtgtctgtgtcactgtctatagttgtacttgccttctgaaagtgctctgtaaaagtatgtcatgttcttcattccccattcatctcacgtgtccacagctacccatctctcctgcttccttgagagcttgctgtgagaaagttctcagctctgatgcggattaaaatcgcattcctttgtccgaagggtcagtctgctgtggacctgctggcagatggcacagatgagtctcccagagttacctagaagagatcagcctttgtgtgtgtgtgtgtgtgtgtgtgtgtgtgtgtgtgtgaatttctgtagtaattgataaaagcagcttttggaaggtgaatcccttgaagatgggttggtcgtgcatggtatctgatccatggaggtgctgagagaaggtgaggtaatcaaagagccttagagctggctttgatggacctctgtgatggtcttaatatttttttaatggtttttgaagacggggttcttctctgtagccctggctgtcctatagacctgtagacctctgtagaccaggcttgccccaaactcacaaaaatccatctgcctctgcctcctgagtcctgggactaaaggcgtgtatcaccactgtccggctttttgtggtgttattgatgcaaatgctagaggataatgattaatttatatagatatagtagaatatatagactattcgtatgtttgcttttcctgtagaagaggagtgatatagaaagatgagagagaaaaagttcataattgtttgaaacatttgctgaaactgtactagtaccgtacaacagaaatgaggaactgtctgtgtgtaatccagtggcagagacaaacgtgtgctatagtacattgctccaaagtaggtcctaggcttgtgaacattctgcctttagtcctgctgagtcccgctgtgtggggatgatgacaggagcttctcagaggagagagggcagcagaactaagtgtgtaagggagtgtgtaaagttttagccttgaacctaaatgcccccccccccccttgtgtgtgtgcgcgtgtgtgtgactttataacttctactttctgaggttagtcatgtatagtgtttcagataaataaaatccatgcctcaagcaaagggaggagagagagagagagagagagagagagagagagagagagagagagagagagactgaatgaatgtctccattggattggcctgtaggcaaatttgtagggactttttttgattaaggactgagtgggagggtcgagcccgctgagggcagtgctgctcctgagcaggttagtggtgcggtgttggaggagcaagctgggaggagcacgcaggtaagcagcactccccatggtctctacctttgtctctgcttcattttattacgctgttcctgccttgagtttcttccctgatttctcttcactataggcgaccacacttgtcagctgaaataaacctctttctctccagcttgctttggtcatgggttttgtcacagcagtataaagcaaactaggacatcacaccattctcctatttggaggcacaaagcaaccatcacctgtgaaatttcagatatttctgtatttcccatcaagattcttctgtatctccccaaagtctggcgacacagacctcttttactgtacctatttcctccatcttctccccacgtgccagtgcatgtgtctgcatgtgttcacgtggtatgtgtgtgcatgcttgtgcatgtgcacatacacacatacacacacagtttttcatgagggactaaccttctagaaactctattttgtgttgtttattattcaaagccagattaaacattttttatgagttatctcaatttagtaagacatcaatatggaggttttttttttttctaattttggtagcagcagttttagcatccccacacctcgaaaatatctttttgtccattgctctcaaaggatagttttgctagatatagaattatgatcgttgtttctttcatctcttgaaaatgcaggccctctgcaagatcagtatgtttttggcccctgagctacttctctagcctgggactctcttctagttctttactgaccccccccccccactccaactttatatttgattgttgaagccatatcatggtggctgctctacagtattttagacctgattttcttcatggtggtgtgtactgattggcttttctcatcaggcaatgactttcctggctcttctgatgattgggttttcagttgtaccctgaacacacactgcctggtaagataccctgggtgctgggcagatcctgagttacagcaggcagtcacctgctctatttagtacacagatcctgatatggtggcctgtttctccagaggtggttcagttttgagggagcatttgtggaaatccttgagtctgatggatcattttcccctggggtcaggtctcattgcttcctgctgctctggctgtgaaggtggagggaatttccctacactggactatgaagctgtttctcagtaggggaaggtagtttcaggcctgtggggactcagggacttccctgcttgtggcaggatcccttgcctggagaggcctggggcgttgagagtcattgtggaagtggtatgggatctgtctagtgacatcccacagtttccctcctatttctggacaatggacaggagttccagttgagcccatagtacttacaacagctcactctgtctgcctgttccattgaacacaccttgtacctgagttctcaaggtttgcggggcttcagatccattgctctttggatggtgtagaacgtgtctggtgttgtcaggggagcttgagattgatctgggcgagccatagcctgaccttggattggcgtctgttgctagggtggggtaggaacctgtaggcctcagcactcggcagactccctgtgccagaaacatttagggtttattttcctgtattgtaatcttacgtacctgttttctaggtaaggcacttttttaaaaaaaagatctatttatttatttattttatgtatactagtagttatcttcagacacactagaagagggcatcagatcccattacagatggctgtgagccactgtgtggttgctgggaactgaactcaagacctctggaagagcagtcagtgctcttaaccgctgagccagctctccagccctaggtaaggcatttttgaagtcaggttaaatgattagacttaggaatttttgttggtacttaagcagaaaccagagttggatatttatttaattatattttagcaaaatgggaactttggaactatgcttttgacttttggacatttaacataccagggaattcacaggggaaacctgtgcaaataaggaaggaatccagtcttaaattattgactgagatggaaggcctactatgtgtgtgaagcaagtttaatcatttttgattaaatctaaaataacgtagcttctgcatgactttatgaaatcgtccttcttgcacaagaaggttctattactggctgcctttgctcttctcattctacttcaaagaatgtccacacggtaattacgatggtgacacttcccaaacaaacgactcctgtaacagcatcgctcagggctctccattaggcagaatccacactccacagaccccagctgcttctcaaaacccttccccatgacacctctgtgtcacagctggagaaggccacaaggtaagaacttagaacttagctgtttttcatttctattttaaaaattattattatcattttttaagatcaaacccagggcctgtgccctgttctcctgactggtgtgtccagttcctaacagtcttttcttttctaagaatagattccttatgggatccaacttcttatggaggcatacaaattcaattttatatcaatatctatgtaatttcctcaaagctaatacatgtttattgtaaatctccccttttctgaagttctttggttaaattggatggttctttgtaatagtcacatatactcatctcccaactcagtgtgagaggtgttaggacacgccaggcccctgctaagcggtgggtggaggtagggatggatgtgaggtgtgaatgcaaggcgctcccgttagtcctgttgactttctgaaaactctttaaagacccaaagaagttaaaattaaagacactattcacctggtattgcttgttggcattctaataggcccaaggagtctatgctgatgcagaatgctaatctcgcattctgtgccctccaactctgcacacttaaagcaaaggcagtgagtttacacacacacaatattttctactctataagttttctttttaatatgttatttatatgactggaaagttggctcagtggttggctcacttgctactcttgtaaaggatccagggtcatttcccagtaccaacacggcagctcacaacatctcagtctctagtcccagagtgtctctagtgccctcttctgactccgtgggcatcaggtaggctcatggtacatgtgtatccatggaggccagcactcatacatatgaaatagtaaaccttgttacagagctttataaagtggatgattgtatccagtttgcccttatttttgtttggcttctgagagctactgagaccacatgttaagctggttgagtgaacagattgagcaggtctgtttctcctcttaccatgtgggtgctttgtacccagtaggtttcccagattgcatacatctccatgtttgtccaaattctatcttcagacaccaaagtatatgtgtatattgtcacagtttcaaaacctttagtctcatgtagactttgctagcttgttcacatgtattttagtattattctagtctaagcgtctacagttcactcaagcagactcctcacctctctcttgtgttacatcttccattaaaacatgctgatttgtctagtcgctgtgcttctaacgtccactgggccaccctggaagcctctgctgttcttagtgctattcaaagtgtgatttttagacccttggctaccttctcagagcacagccttgcttgctatgcgttaaggggtttgcttatcaacaaggaagtctatctatgaggagagaaaaaaaaagccaggcctccaaaacagagtgcttagggacccaatttacttatattctgcccagattccatatgtaacataaaggtagaaagattgttgtgggtggtagtggaagggtagagaggggtggctcggggtgaagagaacagagcaaagacctccacagtgaaagctatcattctgtatgctaatacaaaattaaagtaataaaaaataatcctttgtcctactttcttgtctcaatgggttcctttggcaatcagtacaggtggggcccatgacttcccttaccaccttgtctgtccagcagagatgtcacatttccaggcctctcacaggttgaggactgtaggagaggttgctgcattaaggagggaagaagtcacatggcttggctgtgaagcttggagaggcctggttggatggctggtgccactgcgtgtgactaatggtgcttttcatgggagtccccctccctccattgctgacatgaagatggaggagagctggtagaattttaagaagacccaccctttcttcctccctccctccctccctacgtacctagcttctgaaagggagacagccattcagacgcactggcttcacctcagactgactcaagaggtcagggatctggggcaagggccaggcttcgccatttacagatttaccttttgtgggagtgtgttgagacggggtgtctccatgtcgtcttggctgtcctggaactccctgtatagccctggctggccttgaactcactcctacctcaatctcctgggagctggattgaaggtatatgccatcaatgctcaaccccagcttttacagatttctccactcccatcaatggggtagtgctgcccacttccctagcaagtcttcttnnnnnnnnnnnnnnnnnnnnccctccctccctccctcctcctcctacccctgccattgagatggggtctgtctatccctggctagcctagaacttcctatatagaccaggttgaatgcttagaagcctgccagttctgagtggctggcattaaaggtgtgctaccacccttgactggagaagtttttatataaaatatccagcatagtagatcttcataattaagagttgtgaatcaataatcgtagagagtcatggaaaattagtaggtgtgattgattgcattaggtagtaaaaattgtggtggttataatggttgttgaaaatgtgttatgtaaataaaagacaggtcaaaaatcaaagtttaggatcaaattttagacagaaaaatagttagaatagttacgaagtacagaatttataacagtgttttggtatgaattatttgtaatgtattatttttctctgtctatggtttgatatgaagtaagtttgtttaaaaattttccctgttatggcctctgttttgggtcatgcctttgaattctatgtgcttttaggtaatgaagttgtttttcttactttaaagatgacagcttatgtcatttcacacttacaaacacatgcctcgcttgccttgtcaggcaggggacagtggtttggtgtgtaccacagcagagccagtgtcagggagtgaaggaagagggcagtcagcacggcttagtcagttaccagagaatctggcagtctgaaaacgggctcatttttaaccgttattaggttttggtggttttttgactttttgttttgaactccgtgcctgattttgcttccatcggccacctctgattctctctgtttgtggccccttcatggctggcttctctacatggtctcccttaaaaagttcagtgtttgactttggtttcctttctgcaggtagctgacagctaaaccctctgttaaaccatgaccgtatctgcgtcttgcagaattgctgtacaccgtgccattatgaaatggctgatgtatagttggtttctgtctttcctttctattttcttttccctggctttctctgctgttctgacaggacactgtagtaactcttgattcattttacttcccgacaaggtgtcttagaaactctctccttatcctcaagttggcaatgatgaaatgaagattgcccatgacatcatgtatgtagaggtatatggtgggtgctggtgatgttggtgaggggtgtaggctgatgtagaaccccctctgtcattgtgctgtgttgtaggccaggttactttgtgatgaggtctgtctaaaaggcatgctgcctgtcccagcgtcttctctgtgaatcctgtgttatatatctttttatggatagaaaagaggcccctggatttaatattccagtttatttgaatctttgtctccattgtcagtcaccattgacctttagatccaaaacctggtaaagaatgtagtaaaaggtacagccagttccttgccttggtgtcttctaaggtttgcaaagaacgtgcagagtgcttgttctgacctctggattgtgggagcaaggggagcaatcacaagttacaggagatagaagcccagtcagaaatgtgttgggcctgagggctggtgcaccacgggcatgcttgtgcaacaccaactgcaggtgcacctgtgcccttgctcccgcaaggtctgtgtcatgcttgtaggctgtcccgcaaggtctgtgtcatgcttgtaggctgaggtgaccctgccctcaaggaagccctcacagacctcactgtgtgaccggcatctccacattttctctgttcccttccttcttctgctggctctggcctcagtgtgactcttggaaaatgttcctttcttgttgatattgctactttgtacctcttttctagttttcatataatcaaggtatttgtaatcttcatattctttttatatgacattgtaataaatgggtctggaggctgagtgtgggctgagcagtgtttgtgctgaggctgtatacgatggatcctctgctagctgatccctgggtttcacccacatttttagtttcccataatgctcccggccatgcccacctgtgctccccaacccccgactcctttgggatttttctagacagggtttctctgtgtagccctggctgtcctggaactcattttgtagagcaggctgcactggaactctgagatctgcctgcctctatctcctgagtgctgggattaaaggtgtgctccattgcctagccgtcttgctcttctccctttgaccttacctaatggggtatggtgaggatcagtgaaactaacacgtgcacttgtcacttgtcatccacacttgagtggcccagggggcatgcaaaatgaacgtcacgtggttattatgctccaaccgtttgggagcagtgtctgacataaatttctagctaattgtgtttcttcattgtgatggttaatcctgatcatcagtttgacaggtttgcgatgtgcccaggagggcacatctgtgagagcatttcagagaggcttgcccgagggaagaagacttgctagggaagtgggcagcactaccccattgatgggagtggagaaatctgtaaaagctggggttgagcattgatggcatataccttcaatccagctcccaggagactgaggtaggagtgagttcaaggccagccagggctatacagggagttccaggacagccaagacgacatggagacaccccgtctcaacacactcccacaaaaggtaaatctgtaaatggcgaagcctggcccttgccccagatccctgacctcctgagtcagtctgaggtgaagccagtgcgtctgaatggctgtctccctttcagaagctaactgcctccagtttgttctgtctttgatttttctctcctgtgataaagtagttgattaaattatgttgccgctgagatcaagtttctacccccagatcttttaaggtaggcctggacttgaaaatccaaatgcttttaggcatttgtgaggccatggttatcagaagtgtaatagagaaccagcccatgtgagagagtcaaatgagaactttaacgaaaataagaactattgaacaactttgtgggaccccagctttcaaagcctatatttagtactactctagagaggccacgtaaagctaattttcatcaagcagtcttgccataataaatgcttgcggcctgtcagccatctttgtttatggtgagcaaataaaagaggaggagggaatgaattggcccacgcatttgccccccaaaacctgaccatgtctctttaccgccaaacacattgattcttcaggcagacgtgcaaatacttgaatgctaggccctggctgccttgctctgttgctctttgttgggttgttgtttttacactcaggagtgcctgttcctgccatcctgctcctccagaaattatgccaaaaccacaaacagttctgacatgcctgagaaagaacaggcctgaattcctgttggagttcccctagaatgggtgtgtgacattgatttggtcacccagtgtgatgcctttgttccttgggcagtcaagagaagatgtgccaggtgttttggattgggcaagcaggtaacctcatcacggtcctctctgggacgcagccaccagtggagcaagcttttcagcctcttccactgtaagcctttatgcctgtcacttcccctggctgtatgattttgagcaagttggtgagaatctgtctaatgggttgtgtgtgcatagtaacacccagaactgtgctaactgaactgataacacacagtggagcaccttgcagtgtgagggtcttccagtgatgactcatcttgacccttggaaactgaataggattctgagggaagactttgcagaggagactaaattatggatcccgagaacgaggagatgattctggactgtccaaggccaaacacagttccagtcgttcttaaggagtcctagagcagcagtgaaaacaggtcaagaggggtgcagtttatggccatggggaatgtggccaccctctagaagctggaacccttgaaccttcagaaaatgtccttcgtgcaccttgattttagccctctcaaaaccatcagcttaactcactggttttccagttgtccaagcagatttatgagctctgtgaatggaatgataatatgtgttggcatagatagatagatagatagatagatagatagatagatagtgtggccactatatttgtggtcatcaatacaggttatctgttttatctttgtgtgtgtgtgtcatgcatgtgcgctcttgctgtttttactagatcttttttaacaaaagaaccagtggtcaggtgctatctgtactcagcactggtcacagtcgatccttacctctgagcagtgggtataatgcatgtggatggcacgtggcttaagggagattggatggtgctattgagtgtggactttctaatgggactgccaaagggtgtttatagctagtggattgctttgtaagtggtatgttagttttattattattattattattgggtatttatttcatttacattttcaatgctatcccaaaagtcccccataccctctcacacccactctcacctcttggccctggcgttcccctgtactgaggcatataaagtctgcacgaccaatgggcctctctttccactgatggctgagcaggccatcttctgatacatatgcagctagagacacgagctctggggaggtactggttagttcatacatattgttgttccacctatagggttgcagatcccccccagctccctgggtacttcctttagctcctccattgggggccctgtgatccatccaatagctgactgtgagcatccacttctgtgtttgctaggccccggcatagtctcacatgagacagctatatcagggtcctttcagtaaaatcttgctagtgtatgcaatggtgtcagcgtttggaggctgattatgggatggatctccgggtatggcagcctctagatggtccatcctttcgtttcagctccaaactctgtctccgtagctccttccatgggtgccttgctcccaattccaagaaggggcaaagtatccacaccttggtcttcgttcttcccgagcttcatgtgtttcgcaaattgtaccttatatcttgggtattctaagtttctgggctaatatccacttatcagtgagtacatatcatgtgagttcttttgtgattgagtttcctcactcaggatgatgccctccaggtccatccatttgcctaggaatttcataaattcattctttttaatagctgagtagtactccattgtgtagatgtaccacattttctgtatccattcctctgttgagggccatctgggttctttccagcttctggctattataaataaggctgttaggttttaaggcttctccgtcaggtatatgtatttgttttgggacatgtattcccctatacattcagctgatttctctgtactttatcagcttgtcatttcccatcattcctttgacttcagatactgcttattctgggaataagaacttagtacagagatgacccacattggtcaggtttaggaagttaaggtctggaacactttccgctcgatgtcaccagatactgttggcccacgagctgttcctagcgctgtctctgatggtggccttcaggcctagaccagcttagagcagcttaggaatgcgctggggctcgtaaggacgcttgtgccattttctttttttaaagcttgcaaaatgagttatttacttacttgtagccacagtgtaaggtgctgctgctggtactgtcaaatgggaaaacttgaaagaacgtttgaggccagtccatagtcctagaagaattttgttttacttccaagttacgtggattaacatcagcattatttccttggcaagaacctggcatgaagatattgagttcttagaatctgagccttgttcttctataaataaatcatcggtgactttagattctgggttgaatgtgtacttcccttgttggcagatttcttggcagacctttgcataattgacaatctagttatttaggcctttatgccatggagtgcaagcttctaggtgcaatttctctacttaacaaagggtgttggaacccaatataatttctaaaatttatatattttactgagtatcctagttagggtttctgttggtgtggtgaaacactatggataaaacaatttggggagatagggttatttggctcacatttccatatcattgttcaccagcagaggaagttaggacaggaactcaagcaggcacctggaggcaggagctgatgcagaaaccatgaaaggggtactgcttactggcttgcttaccatggcttactcaacctgctttttcatagaacccaggaccatcagctgaggggtggcactacccacaataggctgggtgttcttccatcaatcacttactaagaaaatgccctaccagctcgcctgaagtactatcttacagaggtgtttcttaattgacgtttcttcctctctggtgtctaacttgcatcaagttgacataacctagccgcacactgagagcgcatgcattctttgttcactttcttttcaagttcaggatgttggaacttcacttatcttacaggggctccagaagttgagagtagaagttggagtttagaggtatgtgccagttagtttttttcaacttgactcaacctagacctctaggaagagcaaacctcaattaaggcattgcctccattgtattggcctgtggccgtgtctccggctcatttcttgattgttcactgacaagggggtacctggtccactgtagggagtcccacctctggcaggtgcttctacgttatgtgaaagcatgctgagcaaccatggactgcaagcccagaaagcagcaatactccatgacctctgcttcagttctgcctccaggttcttgccctgaattttcttcaagatgaactataaacttcttcctcaagtcgttttaggtcagtattttatcacagcaacagaaactgtaacggggtatttagtcatttcatgactggtgccatacttataacttaagtatttcttgaaaaagcctattctgagagatgctacatcagcttccaccagtgtctagcttcgtaagttccatggctttaacgagatggctctgctataaagaatcactattctcaataaagtcatcaagggcacgctgtggctgttgtgctggaacctggagctttccaaacactattgtaagccgggggttgctgtaaggatttcttggcaattgttaagaacaagtgcctatcaataactgataatcgagagaaacatgaaaattcctggacacatacatctaccaagatgaagtcatgaaggaggaaacctgaacagacacagttagcagataatctggacatatgcagttctcacagtttaactatcaagaaatagaaaacctgtgaacagatctgtactgagtgtgtatgtcttagttggggttccattgctgaccaatggaacttttatcaagaagcacttgataaaagtcgatattctttcttggtaaaaatcaatggcagacattcgattatagaaagtatgtatcttagtttactgtgactgctaggcgacaagctgtcgctgtactcaggaaatgctggctgagatctaaggtcagaacaagtcagagctgtcgactgtgtctacttcaccgctggaagccttggagtcctcaggcaagcaaaagcagcaagacattcaacttgtcacacttggtaggaggtgttttgtatagaaaaccttaaaagcactgtccaccatttcagagcaacaacagtgctgggtgaaactccaacacatgattctcagcagtgccgccacccgccaacagtgaagcgctgggggcctgcgtttgcctcttcactgggctgtcaggatgctgctccgnnnnnnnnnnnnnnnnnnnnttgcttaccaccattgtgaagaggtaatccaatttcccccatggtaatctggatctatcacccctcctaacactgttattccttttttagcctgttggtttaagggcattagaagcccaagatgaccagggggaagtctgagcttccagttcaatggaatgtttgttgtagctcctggtaggagcactcccctctctggagccaaaacttctaagccagcagaacctagagttatggggacaggaagcaaaaattttcctagagggtcactaggagtaatagttagtggaactcttccgttttccaccccttgattcctggacccatgaatcctggctatgggtgaaactgtaccatatatcgagcgctgattcaaagcatatactgccttctgaagaactctaccccagccttccaagctgttaccacctaattggcactgtaactgtgtcttcaaaaggcttcagtatttcttgaaaaagcctattctgagagactctacatcagcttcaaccagtgtctagcttcataagttccatggctttaactagatggctctgctataaagaatcactattctcaataaagtcatcaagggcacgctgtggctgttgtgctggaacctggagctttccaaacactattgtaagccgggggttgctgtaaggatttcttggcaattgttaagaacaagtgcctatcaataactgataatcgagagaaacatgaaaattcctggacacatacatctaccaagatgaagtcatgaaggaggaaacctgaacagacacagttagcagataatctggacatatgcagttctcacagtttaactatcaagaaatagaaaacctgtgaacagatctgtactgagtgtgtatgtcttagttggggttccattgctgaccaatggaacttttatcaagaagcacttgataaaagtcgatattctttcttggtaaaaatcaatggcagacattcgattatagaaagtatgtatcttagtttactgtgactgctaggcgacaagctgtcgctgtactcaggaaatgctggctgagatctaaggtcagaacaagtcagagctgtcgactgtgtctacttcaccgctggaagccttggagtcctcaggcaagcaaaagcagcaagacattcaacttacggaagaggaagttaagttgtcacacttggtaggaggtgttttgtatagaaaaccttaaaagcactgtccaccatttcagagcaacaacagtgctgggtgaaactccaacacatgattctcagcagtgctgccacccgccaacagtgaagcgctgggggcctgcgtttgcctcttcaccgggctgtcaggatgctgctccgggaggcgaaatgctagctgagataggggtcccagcccgtgcgcttctccaggtgtcaaacagtgcaggccaaggccgaggctttggttctcaaactcctgggcacccagacaacactgggaaccctgaagagttgagaatgggctatgggcctaggatgagtcatgggaggatcatgggagggtgagtgtccagagttcaggagacttaggcttggctctgtatgaggaaggctttccccaatggcagtccttggtgagagagacagcccttgcttgtccaaactgtttgttcgtggaggaagaggatgcataggcttacccagggtgaacagagagtaaacacctcctgcaggaaggggtgtctgggaagggaagctccttggctggacagtcagggcccatttagatacctcatcagcatgctttaggccctatgccacatggccagttgtgatcctcttagtgggatgtcggggtcacgtgcttcaggataggaacctggccgggagtagattcaaatgtttaccattctcagtgatggaactgtcagggtttttaatctgcttgaccttaccagttagtttttctgtctgtgacacggttccacttgcccacaaaccatgagaaatagaacctgggcaaaggacctgggactaatgtaaaatgtcttgaaagttagagtggggtcaggaagggactttcgtgaatgtctgagatatctgatcagcctaagggtcccttcctcacctcaaacaggaaaaggaaagctaaaacgtactaggtaatgggaaagcaatcacatttgattattaattattaaaggaatgcagtgtgatgcggtcacatgcttatgtgatacaaacatgaaccctggcactagaaagagatcaacaggaatggaaaggagacaggaacattcttacatgttaaaagaaaaaaaaccctcaatacttagcatagtaaggtattatgtatgggagagaggtgccagattatctgtgcaaatacaccctaaattaatttgcttttcaattaacgagaagaatttatttaaaaatgtcattctagaacatttatttctgtccatacaacatactgtccttaaatgaaggaaggacctttgctccttcttggttcagtgtggacattaaggtaacagcaccaagtacagcaatgcaaatacccagattcaaaggaacacttttttaaaaaatgacttatttattcttattttatgcgcattgctattttgcccccgattatgtgtgggtgggttgtaggaggctctgaaactggagttacagaccgttgtgagctgccatgtgagagactgggaagtgaacccttgtcccttggaagaacaggcagtgctcctaaccaccaagcgatgtctccagccctcaaaggagcattttttagcaatttaaatgcattcacacaaatatgactggactgacgggtgtgtggctcttctttgttagggctggggtgggttatgagggagtctctctgtagcccagtttgtctgtcttttccccatctcccaagtgctggggatacaggcacgtgccaccacgtctggggatacaggcatgcgccacaacgtctggggatacaggcatgcgccaccacgtctggcccagtgtgttctgactgagaacgtttgcaaaatgaataacagagttgttaaaagcggtggtgcacacctttaatcccagcactcgggaggcagaggcagacggatctctgtgagttcgaggccagcctggtctacagagtgagttccagtacagccagggctacacagagaaaccctgtctcgaaaaacaaaaaaacaaaaacaacaaaaaaaaagtgaggctgcattctaccaatacttaaaataagtgctggcatgaaatagaagacaaatccgtccatcatctctgcattacaggaagagccttcttctttcccagtcatgaggtgttcctctgtgttcagttgtctgcacgtcacactgttggctacatagtacgtttttttgttttttggttttttttttttttttttttgtgctgttgttagcagatattcccccaactcttatgacaggatgagtcatgccgagagttttctcttgcacgtctgcaaatatccacgtgcaagagttttatcttggaaacttaccaggatctctgggtcataggagttcatcaaatttacttgaaatggccaaacagcagacataatcatgccaagttgggcagtgaggaatttgtttcttctcacggctttggcagttaggtgacagctctcctgaggttttgttttccgtttcctgaccactgatggcggagcctcttcacatgggccgccgcagaccactttaattcctttcacttccttttgtgcttttgtgagatgcatgttttgcccattttttaaaaaaaaataaagttcatgctataaagtagttatttctactttgtggctgtgcacttagtttcagccgtctttagcgtttttaccctagtcagcattagtcagctttcccttcggaagtggtcgtggcagagccctgtgcgtgctgagcacgtgtgctccaccaagccgcatggttcatttcccatacatgacctgccatggaaaatggaggcgatgggtctgtagctcttttggagaattgtttactattaatatgctttgtaagcgatgactcaatcatagtctttaagattataagttacctctgtagtgctactttcagtgaacatgttcaatttgaattttctggtttccttggttggcttggactggatttcccgccttccctccctccccctctctcattttctctattgttgaggtgtgatggtggtggtggtgatcagttcaaagtccccggctggccgcccagaccttactgacctagaggagtgctgtctggtgggtgttcctgattgtcttgtgatctttggaatacattctgacctgattgaggagagaggaatgtgcggaaagatgcacactgtcagctgcaggaggtgggaaggggagggatggtggcttctctgtgctgggctgtgggaggacaggtgaccggcatgtgtcagatggagggcctcaggggtgggctgtggctttttgagttcttagtggagcaccattcttgttctacctagcctagcagaaatgcagctttggtggtcctcagccttcaccagtgtgcctttctttttaggtctgtcagctgcccagaggaagttcgctcactcgctcagagacttcaagttcgagtttatcggcgatgctgagactgacgatgaacggtgcataggtaagaaatgcagggggtccgctttgcttccctctgccttgcccagcatggactcatgcctttctccttacagatgcctccttacgggaattttctaactttctgaagaatctggaagaacagagagaaatcatggtgagtagcagggatgtacatttatggattaccagatttccatgaggggacagtctgggctgtggagctgagcctgatagaagttttgatgcatttagtgctttgaggggatggggttttctgagctctgatttctgggtccatggtggttatgtgatgagttcttggtcaaggtcctggacctctctgctgaagtttctgtcttcattatgcagccgaaggctgggtggctcttgtactttgtgttagcaagagcctttgacttgcatgtatgttaccctaaagctgaaggcaggaccgagagagcggaaggatgctttttgagccttatgtctggatttcttgtcttgtgagggtggccagaactcaggtctggatgtccctgaagctcctctctacagtgaggtgaggtgacatggttctaaggagagccacttctccattcagtgtgctccaagggcctggcgctttgctccatacctcgtgaactcagcaatggagcgtcaagggtttcagagatcttctttcttgtaagtttgtgtgtcttttccagttacacagactcttggtctgattaccactgggtttctacatactattttcattgatgcctatcccccactgctttaacataattagagcttgcagaagacactgagttcagtatcccactcaaaacaatgaagtaaactactgttcttgatacttcagagtgaacactgcctagattaggttgacgtgtgagggggctcagatccaatagcgctggtgatattgaatgtggttactaacgtggttactcatgcctgtctgttgctctcagcagtttacttcaagtctttggattgcatgtcagtctataaaggagagagttactccaccctgttttatgaatggggaaactgatccacatggtctgcccaagatcactttgtgaagtagggggatggagccctgagcttctccacttactgtgtagccagcttcctgcatgctttggatctcccaggtggtacctagctgagtgtctgtcagctgtatttacactgggacaggattctaggggtggaattaattttgattttcaaagtaacacaaccatgttttctaaaatctcacaatttgcactgtgccctacattctgagatattttctagatgttaagaattgcatggagggagctgagaagatgtctcatttggtaacgtgcctgccatacaagcataatgattcaagtttggcttccccaacccatgtaagaaggctagggatgcggcagtgtgcacagggccagggatgtggcagtgtgcacagggccagggatgcggcagtgtgcacagggccagggatgcggcagtgtgcacagggccagggatgcggcagtgtgcacagggccagggatgcggcagtgtgcacagggccagggatgtggcagtgtgcacagggctagggatgtggcagtgtgcacagggccagggatgtggcagtgtgcacagggctagggatgcggcagagtgcacagggccagggatgtggcagtgtgcacagggctagggatgtggcagtgtgcacagggctagggatgcggcagtgtgcacagggccagggatgcggcagtgtgcacagggccagggatgcggcagtgtgcacagggctagggatgcggcagagtgcacagggccagggatgtggcagtgtgcacagggctagggatgtggcagtgtgcacagggccagggatgtggcagtgtgcacagggctagggatgcggcagagtgcacagggccagggatgtggcagtgtgcacagggctagggatgtggcagtgtgcacagggctagggatgcggcagtgtgcacagggctagggatgcggcagagtgcacagggccagggatgtggcagtgtgcacagggctagggatgtggcagagtgcacagggccagggatgtggcagtgtgcacagggctagggatgtggcagagtacacagggccagggatgtggcagtgtgcacaggtagccttgcaccagagagggaagccagggacatcctggggcttccagctagagagtctgactgaggagccgagctccaggttcagtgaggctctgtctgaggagaaatgaaggtggagaaagggaacagaggaagacagctgctgaggaggacagctgcttgttaacctttggcctttctacacatctctgtgtgcctgcagcaggtgtgtacacatatgaacatgtacacatagcatacttggaatctcatggtgtgcatgtgaagatagtatgatcacatggacttttcccagcatgcactgacaggttcaactagtgtttgtataatgttatagtcactaatttcttagctattagtgaagagtaaatatgacattagatcacagttagtgccatgtcatcacctttctacactgtgtggagacatgggggtgtgggctggtaataaagcatcttggtttatattatataaggagtatgtttgtgtgtgtgtgtgtgtgcgcgcgcgcatgcgcacaacttcctttggcatttagtcattcttttctgggatcccaagcatgtggccagttgtcattgatcttttatgttcttattggttgaaatccgagggcttggtagctgtggcttgagtatgtatggctcccatagaatcaggtgtttgaatgcttggcccatagagagtggcactattataaggtgtggccttgctggaggaagtgtgtcactggagagtcgggctttgaggtctgctatgctcaggctatgcccagtatgacacacagtcacctctgctgacggtggatcaagatgtagaactctcagctccagtaccggtctggctgctcgctaccatgatgatgatgaactaaacctctgaatgataagctagccccagcttaatgcttaacttcataagagtagccgtggccacgatgcgtcttctcacgaagacacacgtcagagtgcctgcagtcacagttgacatgctagcatggcggtgatgagtggacacccagtgtgccagcagacaggaaagtgctacagttgagagcagacgggcagagctgtaggtgagctgcggcagagaggttctgtgttgagggctgtttcacagagcactgttggcgggtcttccccacagagtggggctggagttgggacttttatggaaaaactatgtgaccactttctgccttgatggtctgtttctgaattccttggagtgaactgatgagaggaagagattgaaatgtggtcttggactccgatggagatttctcggttcctagagactctgttagctggctgtgatttaatcttcggctttggaggcagctaacagtgcttttgactgaggcgaatgagggaatgaggctgggttcctggtgcaggcagatgtgagaataggattgtgtctgcagagtcctgcatgcctttaatctcagtactcgggagccagaaacaggtggatctctgaatttgaggccagcctgcttgnnnnnnnnnnnnnnnnnnnnnnnnnnnnnnnnnnnnnnnnnnnnnnnnnnnnnnnnnnnnnnnnnnnnnnnnnnnnnnnnnnnnnnnnnnnnnnnnnnnnnnnnnctacacggagaaaccctatcttgggtgaaaacaaaacaaaataacccaaaacaaacaaacaaaaaaatcaaccactcaacccccccccctaaaccaaaccaaaccaaaacaaaaaacctacccctcaaaagtgatatttgagaagaggggtagctgctggaagaagcagtgagagacagccacaggcaccccagcagacagccacaggcaccccagaacaagaatacggtgttaaattacacgtactcagcacccagtgccacatctgatcctgtttctcctgtattcctaattctgctgctgttttgattgacagcctggcatcgtgacatctcatgtacaaatatatacatttcgagtacaaatacctcagcccgtatctcaggaagttgccactttaacaaaacccacggcatgcctttattctagaaagcaattcaaaatccgattcgttccttctgtgtccctcaccgtagtagctggtttctcagaatcctcattcaaattaatttcattcgattataaatttctaaatcgcttcagatttatagtgccggggcacaagtgtgtgccgccacacacagcctactgagtgctgaggctgtaggcatgcattacccccatgcagtgactgattctctcctgagtcaccatagggcactgcaatggaattaataaaggttgcaaggccagcgcagtttaaccacattggtgttaagtggtcctgtgtatacccttggtagtgattacttcttgtgatgcacgagcatcggatggaatcatcatggctccctgaggctttaaaaccttcctgaagcttatgaagatacgatcgtgtcgttggagcgcacaaagaacagatacccacctcgaggaactttgagtgtggtcctggggaataactggtaattagcaagataatcagaataggcaaaggtctgaagtatggctggcgagaggggggcagcaaggccagaagctgcaggaggcagggaagctgtgcgggaacagggagtagtttaatcagtaagaggaagaaaattaaaatctgtggaaggaaaaaaaaaacaatgcctgtggtattaattattaaaaagtaaatcctgttttggggttcactactggcctcaatggtttatgttcctggaagaaagacacacacacacacacacacacacacacacacacacacacacacacacagcctttatattttatcatgccttgaacaacacaatagctgggccactgcctaacctctgcatagttaatctatctcctgctgaatatcccaagttactacttaactacttctatgttctgtttttgttgccctggacccaggtgggcagctctgggacgagctctcccagtactccacgtggcggccatgcctctctgtcctgcaccattctcaggcatggctgctctcctctcttccacactctccctgcatggaggatctgtctctgtctctgtctctgtctctgtctctgtctctgtctttctctttctctgtttcctcccctcccctcccctcccctcccctcccttcctttccccttcccttctttctctctcttctcctatcctctcctctctttctcctttctcctttctctggacctgggaaattctaaaatcccgcctctgtctctcctcccatctttatttaccaatcagaaccaactgggggcaggttcccagaaggtaagcgcagaccttcccacccaaacagttttgggggaacatattggcatttgtaatacaagcagctacaaatgctaaatattgtagaaagtttttctttctttctttctttctttctttctttctctttctttctttctctttctttctttctttctctctcttccttccttccttccttccttccttccttccttccttccttccttccttccttccttttttttctgaatatcttttttgtgggactttgggctttagcaggtaaattcatctgtctggaagttggctaccaactccctatctgtttaagctgtcagcagcatgttcatatgcctactccagacctaagcagggccatacatctttaatttagcaaataccactatgtgcttgctacatgcccagtgctgggttgtgacagtgtgacacagttctgtctcttgagtaggtggatatccactaggggaagtggtcaaaagcctgtgcgcttagtaattctgcagtaccagaggcagtgggggtcctggagaggtcagtgcagagccggcatacatcagttagtcacttaagcacagctgagctgaaatgctgcgtccgtcttgagagggaatctgcttccatttcaaggagagtgaagtatgtgtttgagtgtcccccaaactcctcggttgctattaatacagagtttacgggtgtggctcagtatagaggatgctcagagtgaagattcagtccctggcatccagcaaaactatgaactgaaatccgtgactcactggaaaaggaagcaggcagagtaccagtttaggaaaagaagtcactgtttgctttcacacccaaacatttggtcttcttgagtggatgcgctcagcgctgtcagtgttgtgtttttcaggacagggtttcgaggtgcataactttttcttgtagtgtttctgaccctgactgtggaagtgaagagacctaaactagggatctgagctggaccatagtaagaggccagacctggcagggttgcgtgtgtgcatgctgtctgaggggagctgccagcattcctgtgatgttctgtgtggcctgacaggacatgctgtgcttatctgaggtgggcagctgtccaggagtctgaggactttaaaaatagtgtggcagcatttatgagcatctctaaaaagccctgtgtactgtatttacttctctgagtaaatcctttgaacagacctagttttgttttcttgccagcctgtaagtgaggattcagtttctgagcatcctggcaaatcagagttggggtttggactagagggttagaaaagatgcaggaacagtgcgtgggggagatggaaggtggagctttccaggggcgcccagaggcaccttagacgcaggaggtctgggcagggcaacctctccacctttatgtatctctctctctctctctctctctctctctctctctctcacacacacacacacacacacacacacatactttctgagttctgctataaccactctggtgtttgacacttggtttttattctaaactataactctttcctttcctttcctttcctttcctttcctttcctttcctttcctttcctttcctttcctttcctttcctttcctttccttttctttttttcttttttcttttggtttttcgagacagggtttctctgtgtagcccttggctgacctggaactcactctgtagaccaggctgacctcgaactcagaaatccgcctgcctctgcctcctgagtgctgggattaaaggcgtgcgccactaacgcccggctataacttttttctatagaaatgttttataatgttactgaagtaatattaaagtaaatgaatgtttttgctctttggtagtgctccttcttcagtgtgtcccacagcaggtgttctttgaacatggtgtctaggccagcatcaccatctagtgtgatggttggtttccattgtcaccttgataggatttggaattgcacaggagaccggacttcaggcttgtctgtgggggcgtttccagaaagggttaactgagtggcagtgtccaccccatgtgggcagcactgtgctatggcttgcttcattcctgctgtgttcctccatgactgatcatatactctttaactgtgggcttccccgtgactgaccatacaactcttgttgaacgttgcttatgaatgtgaatttacatcataaatggtataaaccacttgacggtctatgctttctgttcacaagtcacgtgtgtaataacaaatgagtagtcagttctcctcctccagagaaagtgacacatttttctatgactctcttactttgttttaaaagctgtccatgacagtgtgaggcgtagtgggccacacctttaatcccagcacttgggagttagaggcaggtggatgtctatgagttagaggccaactttaggacaaccaagcctagacaaattaaccccgtctccgaaaacctgatacaaaactacacaaaagcaaaagttgcccgttacttattttacaaaggtttctttctttctttgaaaatgatgataatattttcatttaatttaattcatcatccttttgttgtatatgtttagtcaggtatgcatgctattgtaaatcttgctgtcaggaatgtcccagttggggattcatttttgcatatctagaatacttaaggaattatatccatgataaacgtaactcgtaattgtggtatgagtgtgactgatatggccaggagacttgaaaccgtttttgggagaagccttcttgtcccatgagtcagtgtcttctctgccgactcattgtcatgtgtgactctcctgtctcatcagattgtacttccccagtggaactcatggttcctctatttcagattctttgtttctaaggaattggcttactttggattgtgcatgtgtccacagaaccaggagccaccagaatcttgccagctcgttcctacaattgtctaaactacagtgttattggaaccagccgggttgactatctcatggcgcatacttctcgatgacctggggcctcacggatcatgcatgagttagaaagatgagaggaaattgtagcgcactgaagtgaacagttggttctacctcactaagttggaaaccactgctctgttaggagacctgcagaggagagaaacattctgtcttttggcttcagctgtttgtaactttgtctttttcctcacctcttcttggccagggtgggggttgggtgggatggggtgtggggggatggggagggaggggnnnnnnnnnnnnnnnnnnnnnnnnnnnnnnnnnnnnnnnnnnnnnnnnnnnnnnnnnnnnnnnnnnnnnnnnnnnnnnnnnnnnnnnnnnnnnnnnnnnnnnnnnnnnnnnnnnnnnnnnnnnnnnnnnnnnnnnnnnnnnnnnnnnnnnnnnnnnnnnnnnnnnnnnnnnnnnnnnnnnnnnnnnnnnnnnnnnnnnnnnnnnnnnnnnnnnnnnnnnnnnnnnnnnnnnnnnnnnnnnnnnnnnnnnnnnnnnnnnnnnnnnnnnnnnnnnnnnnnnnnnnnnnnnnnnnnnnnnnnnnnnnnnnnttggtgactaagatggaaggtgattcactaagtgtttgggctctgaagaagttttagaaatatcttaacacaagtagtttatttctttgttcatacatgtatgtgatgaaaataaaccaactttcaagaagctctttggagaaactgaaatataagttcacatataataaagcgtaataatattttcattatagtataggagatcctggaggttcggtccccgtccccccccccccccccgcctttgtggcatgctattgtcaataaagatggtcttattctggtggtgggatttgttggaagtcaaagggattactagctgccgtgatcctgtggagaactcttgggagttttgcctgtcactcactagtcctgtccctgatgcagggagagggagaatgatgggttgtggacttcactgctgcattagtgtaaaggccaggcccctccttccgcagcctctagctaagcacggccagggaaggaggctcacgccggtggacggtcttgctcagctttctcagagtcactttgagcatagcatgttaccatctcggcctcccctctcctttccccggccactcccttcatttcctggggtcagatcctcatctaaccgtcagccccttgggaagcctttctgggctggctcccccttcctctgatgtagaccttggcttttgtagcctttttttttttttcccctgtgtctatgtattgttctgactagcagaaacaaacttttgtatcagatttgttggtggggcacaacagcaggcagagactctttgctagtgtttgtgttatcaacagcagctggacattttgtgtttgtgtacactgctcttttcatcatctaagttgttagggcttcagtcactggcaaggcttttttaatagtaaatttttgagtggtttttcttttttcttttatgtgtctgtgtctccatgtgcatatgccatacttgcatggctacccatacaggccagcagggggcgatgggtcctccgaaaccggagtttctggaagtttgtgagcctctgatgtggatgttggggatgaaaaacttgtgtgttttttatttcatatgcaatggtgttttgcccacatgtctgtctgtgtgagcatgtcggatcccctgaaactggacttacaatcagttgtgagttgccaagtgtgtgctgggaactgagccagggaagagcagtcagcgctcttaatggctgagctgtctgtctctgcagcagcacatagttttaaaagcccgttctttctgggcttggccatgttctagctcctgagggtgcagtggggatttgagcttcttgtataagacaggtgcttagcttgtagccatctaagggaccacattagcatgagcccttcagcccaggtggtggccccctgccagtcaagggtggcccgtgcacctagagaggctggaggccccagccccttttgttggtgatgaggtgctcattttgaagagttctttctttgatttttttccccttttgagtttgctgccttattgagtgcagtattttaactccaactctgtctataatagcatcgattgaaggaactataattttctttttcttacttacaactggaaagccaaactttaacattctgtctaaggatgcttttatagccttctgagagactaacttcatcacttatttctgtgggttttgagttccttctcacagtgttctgcccaagtatttattttgttaaaaagataaaatgagggtccttattgccacacatgcagagaggagagaggaccaaggttaaacaaggctactgggtccagtgtccttggtaggctaatgccctcctgagatgtccagcagtttttgagttatggttcatattaactaagtctaagttaaaaattgttaccagtaaaaggcattagattttaaaattacagtcaaacactgctttttcctctcagagttcatcgtggatttgctttgttcctctcccttttagccaacttttgcctgatgtgtgtgcatgtatgggatgtgtgcatgcaagtacacatgcagcctaaagactttgtagagcacagatgttaggaaggggactcttaaagttttataattcatagacttgacttttttcttttcatttctttttcttttcttttgttcttgtaaatctgagcctaggctataggcagtattctgggaataaatctaaaacaggtttttagaactgtagttcgaaccttcttgatgtgttggtttcaaggtaattggaatttaggattgaaatcgatgaacattctcagaggatccttcttgttcttactggaataacaatagaaatgtggcagttggactaataactgtgaaacgctcattgttgggatggaggcgatctgtactgttcacggggtggctgtggactgagcactgggccttcagttctcttgttttcccatcctgattccagacctacacaccgttgacctcagtccttagctgattttcagacctacacaccgtagacctcagtccttaggtctagctgttgctatgagctcattgcaaccctctggccagtggtggtgcacacctttaatgctgccggccaggagccagaaacagggatctctgtgagttccaggccagcttagttcacaaagtgagttccaggccagccagggctacacagagaaagcctgtctcaaaaatatcggccaaccaaataaacataatactcactggttttagtgaatttaggttagtgattttgagttattactatacaactaatgtgttttaatgtttgtttctttaacagggctaagagtcagtttaagctgaccttaaaaaccaagggctgtactgggctttcttggcatctgacccttctctgggtgctgccctcttctcttgcaggtgttaggtattggtgtcattctttctttttggctgaggatatttggataacaaaacaaaattattttctgtgctgaaaagagagaagcagttagggccgagccgcagtgagcagagagtggccttctgatcgtctcagaaagggcgcagcggctttctgacggtctcggtggcagggcacaccttgctctgctgaggtgaagatggaatgatttctcaatggcagaattttttttgattcaattcttttaccagctcagctccttaagaaaaataagagcacttaactggccattttaatcgtatgagactgggatgtacattgacaggaaaagctacagtcctggagagcagccagctggagaaagggtcacagtgttgggaaatacaatgaatgtgtgaggtgtatctggcaggcccacgccaagatgtcccccagagaaatgacatcctgtaacggatctgataaaaagggggaagggacgggagtgaggccctggagagagggaagacacatgggagcagagctatgagggcagagaagaggggacagaggagggcagagagagactacacgtggaaacagtgaactggggtggcaatcagttcttgcaaggtgtgggaatggcggcaggtgatgatgtaagccttgcttaggtccctggaggtatctagtgaagttgcttgtaagctcccacacagcatgagtgtggatatggagggtaattaaattatttaataatgaattggtttagccggggaaagtttatgcagcagtatatatctcaccgcatggctgcacacaggacaaagcactgggaagagggaggcctaccagtggtaggtagaggtaagggagggacgtgaaaatgagctagtcccatgatgccttgggtttgaaatatgccatagtgagatcattgaccttgtacacctgctgaagattaatgtgtaagagcagcgtctgctttagaaatatttcacacagttctttaatagaaatagttatctacactcctggcaccttagacagtagggcgtgaattatcatgacacagcttcacagcacagcttagagagcaccatgtaatggccacatctgagggttcacatccttttggtataaggtactccactttctaaaatctttctcatgctttcagagggtgtatcatcccaagccacagggccctattgacagcataggtgaccaggcccttacagacagccctgaggggtttttccatgtgtctccaagggtctggaactacccacttcgctttgttctgtgacagggtgtctcactggcccagagcttggtgatttggccaggctggctgacttgtgtgcaccagccagggtcctcttgtctccgtcttcacatcctgggattgcaaacatgtgcctttatgccgcccagccccctttaagataaatgtaggttctggggatcattatattgctcttgttttataacccaatccaatttgtgatctcaaagcacctgaaagtagatttgagactcgataggcactgtttgggctaggattcttcaaacagctgctgtggatcagaataaggcaaagtgggcagggagatggttttgcaggtaaagacactttaaatacaagtttgatcccagggacccacaggagattcctggaaattgtcctctgacgtccacgtgtgtgatgcgacatgtgcccacctccccataagttagtacatgtaaaaaggaaaatttaataacgaaaagcacactccctgggaagatttatggcatctgtaaatgtccttagttgtaacagtccttttttggaaaagtatttttcattttgggaaaactgttttgttcagatagataaatccttggccccctctgagagttcctgtttcaaggaaaaataaacagtgtgtcccagctcggtggttcctccactgctgtctgcaacgtggaagctgagaagtagagtttgccctttagtgcagtaaaattggaagtgtctggaaggtcatgggagaaaacagtgagaagtctcttttgccccgagaatgcattccttcagaggccacggccccttggaatccaggatgaagtcgtgagtgctgtgggggaatggatgtcattccttctgtttcttctatattcagcccggctttgctagcagctcctcattagaaaggcatgatttggtgtttaccccagcctgtcacggtttaacctgggctgatccgttaaacagtagttactaactaacgcactaacgttgccataggacatcctttctgtccctgcctttgtgcttacagcctcagaactcagcctttgatctccagggtgggaggaactgagagctgatgctgtggtagaatggcatccagccgggtctcttgtcatggccagctggggtcttagctcatcttgagctgggtaggttacttaatagaagtcacagccttggggatttgattgggccaagcaggtgctctgccatggagacacgtccacggccatctctcaattttgattctgagactattcaagcttcttatagccttgcatctaatgagaagagatgtcacaccacagtcataatggaaacaccatcggaaactttcatagtcattttattttttaccttgtgcttgactattcttggcactattaggaggcgtggccttgtcggaggatgtatgtcactctggggatggacttagaggctccaatgcttaggcttctcccagtgaggaagagagcctgctcccaagtgcctgaggaagccagtccccttctgttgcctatggatcaagatatagaacttttggctcctccagcaccatgtatgcctggatgctgtcatgtttcctatcatgttgataatggactgaacctctgaaactataagcctgccctagttaaatgttgcttttataagagttaccttggtcatagtgtcccctcacagcaatgaaaccctaagacatcttatattgtgagtctgcctgagtctggggtttgaggtcttcatcttgtgcagtaatatggaaaaacagcttgtgctttggcttgcccgagctcaggtagaatcccagaactgtggataaattaggatctcagggctcctggggtaactttctgtagagaaggacctgtaccggatgggtttctgtgtcaacttgacacaagctagagtcatcagagaggaaggagcctcaggtgagaaaatgcttccatgagatttaaatctcttctggtaaaggctttgctggtgccacaggctgccagtggaccacaggctgccgctggacccttcagcatgtggacctttggaggctgtttagatccagaccgtaggagtgctcttaggtagctttgcacgtacagaatctcggaacagttatagatattttcatcttttccacactcagttcacatagcttgcagaagtgtctcctccaatctacccacttctttttgtgtcttcctttgtgtaagccaccatcctggcttgctcctggggaaacccctgggaagagtttcttcttttggcttcccctttgcttatggcaggggatctttaagaagatgtaatcattctattggttctctgcttaaaacactctggtggcttctcgctcagccacggatgttgtgactgtcatggtctgctcctgtacgtcactcagctctttctgttcccttagatgtcctatgccccagctatactcccctttgacagtacaggcataagcaatcactatgccttaatcctgtgcctctgctggcttcaggctggaatctgctccccctgaccccttcacacctttcagcacttagcctagatgtcactgcgttgatgaaactcaggtggagcacgtgcctcctcatctcctttgatgaagtcctcaaccacacttggccctacttttctctggttgaaggcatcattataatttgcacttgtttctcgctctctaatcagcagatttcacaagggctggggggctgttcttttggggggacattataccttggcccagtgctcacacataatagtttactgaactgcgggtttggttaaggtggctgtttgtgatcatgtggtacccatttggtactgcagtgttctattgttcatccctctcctttgtgactataagtatttgctaggctctgttagactggcaggcagtcccaggcttccttctttcttgagcatattggcctctatcaaggatgtatttcttgtgtatgggtttattctgcaacaatagtaggctagatctggacatagaagctttgagatggacacagggtgttatatattatatttctatgaactatttttatatttattcaatttgtatgtatgttggaggggcacatagatgtgtgtgcttagaggtcagataagaacctggtcgagggggtcaattcgcttctactgtgagggtcttgaggaatcacactctggttgtcagacttggtggctggtgccttttctggcccaagtatcttcatttatggagattgtctgtggattggatcaccttgaaaaacatcgagagataaagcctttggtgtctggagatacaacatagtctgttccgggtctttctaggatgactagttctttgttctcttcttcagcgtgtggtggtctctgggttttcattattgcaggtcacatggtgctaaatgtagagcattcagatttaaaattcaaaatgcctaagatggatgcatttggaagatgaagccattctccctgtgtggacgtttcttctccttgtgtgtgttgccagggctcttttgcaactaagtagcaaattttccaagtgggcgaatggcatacaggagcccttgtgtttgaggggacagttgtgtgttttgtattcttcactttgtactatggatgtccactttagaagaaatcattttatagtgggtgagcgcagagcagccttggcttacattaagcgcttgccacgcctgcagagggaggagaaggaaccacatttgatttcggatacattccttttaaatcattcaccatttcccccttattgtaagcttggggtttctttcttttttagggagggggctttgtaaaaggtggatgacattcttgtgtagctttgagggccttctgtcattgtgggtatttctgagtcttgccactggaggctgagagggcctcctactgagagttcagttgcgtgctcttactgagtatgcctctccttaggtacataatccttttgtttgcattttcagcattttgtggctttgaatgaaaaccctcaagtgagtcactgtaagccatgaatgagactgtggccagatgtgtgtgtgtgtnnnnnnnnnnnnnnnnnnnnacacacacatgcgtgcacatgtccctcctcttggcctccccctgcaccccattcgttgcctgccagcaggtcactgcacttgttctgactgtggaagttgctgacgaggaactgtcagtggtgtagtgcaggctccttgtatttggaagattatccacagttctcaattctcaatacagtctgaggaccagtgaaggaatgtaattgacttttaaatctctgaggaggaggtgaagactgtcgcccacagaagtgttctgttggtgggtatgacagagccttttgttgtttatggatggcttcctcgatgttctgtggagagctgcggggccagttccgaggttccgtgctccccccagctgccccagctcctttccctgaaaatgtttacagctgtgtagctctttagtacattggcagccgcgactcagttgttgcattggcggaatgaggtaaaacagccaagtgtgttgttgttcattttgcttctgggtggagtgcaagatgaaaatgagacgccgcttttttcctaacgctgtgttcttgttgttattcttgttctctaggcattaagtgtgactgaaaccctgattaaacccttggagaaattcagaaaagagcagcttggagctgtaaaggtttgtgtctaatttgagcacactcataaacagaacatgcctatgtctctactgttgctgtacactttagttacctttggcagggtcgagcagggaggtgctggggtagacgttggttgatgtttgagatagatgcacttttcccactcagggagggaaagtgaaaacaaaacaaaacacctggatgggcagtaaacatctagcgaaacctggccttggagattgccctgttttcctctctagatagaagtctttcccactatagagctgcagccatgtgcataattctctgtattatagggaactgtgacactatgccagccttaatgttatggacactcctcccacccgaagccctggaacctgggatgagactattgctactgggacatattttcctgactctagcaaagatttattaagcttctattatgtgcaactattttttgtaagagtgagctacagcctcacactcaaggatctgagatgtagccaggatttctgggagtaatacagcaaacagctgtgccacaggggagcctgaatatatttagcaacttcaaaggtttgtgatcttagccttaaagttaacctagggaaataatttccacccccccccccaccacacacttcctggtctttctgtccctctcctctcctctcctctcctcccctcccctcctctccttttnnnnnnnnnnnnnnnnnnnnnnnnnnnnnnnnnnnnnnnnnnnnnnnnnnnnnnnnnnnnnnnnnnnnnnnnnnnnnnnnnnnnnnnnnnnnnnnnnnnnnnnnnnnnnnnnnnnnnnnnntcccctcccctcccactcctctcccctctcctcctcttctcttgtatgtgagagacacaaagcacaaactaccatttgtgtgttattgaccactgagagcaaagagacgagcaaaataaattttaagtagggaagagaacacccatgtttgttacttttttccacacagcatttgggttgtgaactttttcccctttctgtttatattcacagatagaaaaaaccttggccttccccagacagccaatgagctgcaggctctggatgctttctttcttctgctgaccatcagcagaatcttctctcattgccttcccacacgccccaggcttccatgtgttccatggttgtttatcaaagcagtagacagccgcttacagggagagattgctgcactgatgtagtgtatgacacaggccgtgcagcgaccaagtactatccctaagtcctgtttctggcagcaggtttttggaggatttggctacattcttggtcagtaccgtatggggagtttctgtcctgtctgttggtgatccctaggaaaaccaggtgggaccctggagaactccccacccttaaatataataaacagaagtggtctcttctaacagagccatgcacaaacagccatcccttacattacgttgttaaatctttaaagatcacacttcatttcattaccctctagaagcctccatagatattaccctcctccttgccttaccatagatatctagaaaggagcttatttggttaataacagttctgtaagaaccagagaagaacttgcagtttagggggggtgcgtgcacacgtgcgtgcgtctgtgtgctagagtgtgtgtatgtgtgtgcatacactcgagtgtgtggctgtgtgcatgcatctgtgtgtctctgcttcctagacactcagttcagttttgacaaccacacgcttgtgttcttttggttagtgtgcttgtatgctatgctttacaaagactttagtctcttagtttgaagagcttcttgaaaaagcaggcacagaagttttctcccgtggagataacagcagaacaaggtgccggcatctgagtctccaggtgtctctgtcagcatcctggcttctcgcctgctctcctctcctctcctctccctgtgtgctgacctcatccgcagtgcctgcctctctggggctttttggtttcatctgtgcctgcattctctcgtttccagaagcttaattacatgtttgcctatggtttaaatgtaatctatggcactaggcggtttctgtaaattggatttaaaaaaccttccaaggtactctggatggttgtgctctgtcttgacgtacctgccttgactcatgtctgccgggtttgggcttgtttctgttttgaaggttcttctgtgttttcttgtaggcttggtgggatcaaaccctgtgtgcgagcccactggccttgacaagtcggcaaggcactggctgctctgggcttgtaatggtgctggtgggagtttacttcgaggcctgcttcattccttacctcattttcacgccgtttcttttttctgggcagtgttggcatttattttgcagtgcccccagcaccttgagagccgatgttcattagaggcatgcatatgagtaaactgtgcaagtataagaatgtaaaattgctttcttagacagctgaccagccaggtagcagtgcagacgtgggtctgtgtgagtagcagcactgtgtaagagtcagtcggacaccctagactgtactgactcattccaccgacctcagagagcgatgggagtttgatggtacccagtagacgcaaacatttaaacacaaggcttgaaataaatgtcatttcatagactatcacttctcacttcagcctgggaccaaacttgcagtcacattttaaaaacatttctttccaggaatatgtctcacagatagacttaatataaactaactcgccaaggttctgtaaataagtgcagagtgtgggtgaaaccaaacctctcccggtggtttgtcgtatcaagtgctttgctatagcaggagtgttgccataggttaatcctgttactttcattttagttataaagcacctacttgtgcctcagaaggcacagtgtgcggccgtggggcacacagggaattaaagcactggctggccttcggctccgtgggagaacagtaagcacgccctgcagaagtggtgtggggagctgagcagagatctgggatgcaccccatccagctttggaacacactcaaccttgtcagggaccctgctttatgtcctgtcacaatcctttcagtgcctgggtgaactgcgttttggggccactctaggcctctctccctcagttgtcagaattatagggatctggaaatactgcccactggccaggtcttgggcctgaagtgtgtgggtgctatcatttcacatcctacctgtggcactggctaggtggctccacagcgagtgttcacttgttgacagtggctctggtcagtgttggcacacttgtgctgtgagcgcatgctcactggctcatgctggatgtggagcactggatcgtgtaggaggaagagctgagtgttcgtctctttagagaggctaagggcactcggagagggattatagctagggcaggatcgcttgttgggatgctccgtgtgagctgaggggggtgggcacccttgggtctgggtccactggcagtagggtgttagtggatcctggaggacgaaaggggatacaggactctgcttcctggaatgtttgaagagtgaccttggtgatagctgcttgcattgggtccttgttccctgtgaggagtgctccttcaccttctcactcaaatacagagagaagagttggaattgcctatgtaagtggttaaattctctagactcctcaaacatggatgttagttagtgtttacatctgaaaggtaaacctttttgtttctcaagaaaagttgtaaaatgtaaaactatacaaagatagtcacgttaaagaaaatctaatttaaaaaaaaaaaacctctcttccaaaacaaaacctaaattctggcgcaatgtacagttatgttcatattcctttgatttctttctttttttatgaaaatgtaaaagtcttagtaagaagtataaagatggccatgaactgagtgagtgatctcttctgaggtaggtggccatgccctcctcagttgctgtttaccccactaactgggatgttgtacattgttttgaaatctagaagatctttgggctttgcttagattgcctttgttttattccgagatctgatggtgatctctggggcacagcttcatttcttacgggtgactcagcccatctggaattgattttgacatgggtggggttctgtttctgtttcccagttaaacagttaacaccaatcccactggttaagtgatgatttaaaaatggggtgctctctgccaggcacccttgtatatgttctactgttaatgccctttaagaggtccattgattcgagttgtgggtcttaggttcatgaatttctcttccatttatgtatttatattgctcttattttatcccacaatgctattttaagtcatatctcacttttttcatgtgtgcaattttataacattataacttctcgtgagtaatatttaatcttcgcttggtttagtaattttataaaaacatgttgatatactttcagctgtttgatgaaaatgaaaagagatgacacatgggacaggctcgtttcccacgtggagaccagcccaggtctgtcacagtcgcttctggggagggctctctggcttgccaatgcttttatctttctttagcctgcttcttttccagtgagccacacttcatggagagccgaaggtctcttgattttatatgtctgcttcataagaaacatttgctccttgccattggtttgaactctaggactttgctgccagtttttattatacccttttcctatgtgcagtgtagggaagggcagactccattctttattggttgcttcctaagatctatataactttaccacaagaaatgtgagcacaaagaatatgctacaaccacactcacagaataaacgcggagggataattgtgtgagccgagattccaggagcaagacacaacaacatctgtgcagtgctagcttgtgccagctcgtgccaggtgggagcattcctgtggcagtactggggctgccggtgtagtgtcctgcaggtgggcagcacacgagtggccacatgtatctaagtcataatgcagtctccacgctggccgcttttaaatgggcgctgcggtggaggcagcagtgtgtggtggactggactttgtgctctgatagcagtcaacgagaagcaccagggaagcagagatatagtggctaactctaactgtaatggatgtaaatgcacagagatgctgtgaactctaattcctgtgagaaaaggctgtggtagttcactgtcgctgacttaggaaacctagacaataaggaaggggatgagcctgtgacgcagtgaagagcaggggggaccgggacgttgatagacatgcttttaatatccaagggcgtagtgtgttctcatgaggctagagtttacctagctgagcagcggcttctctgtcatctctgcaggcagaagctgggatatttgttttctcaatgccttcacagcagaagcaaagcagactctagtttcgggtggtgctggagcagggtgtgagtgagctaagcgaagcagctgagggcagtgtcagtgtgggtaggggggtctgttgacccgttgtggcttctgttcagtgctgtatgcatctgtggcagggctggagctctagcagttctgggtggagcattacgtagtcaaactgggctccgatgacttccctggaaggtcttagggttgttaggatcaaaaacatggccaaacttactggcgttaaaatgaatttcaacttgtagcaaagtccagaaaaaaagcttttatttattcataacacccctagacctcccccccccccgcccccaccaccctgccaccactttcccacaagacagggtttctgtgtgtagccctggttgtcctggaactcactgtatagaccaggctggccttgaactcagagatccacctgtccctgcctcccagagctgggactaaaggtgtgtgccaccaccacccagctgaaagtttgtcttttatgctcagccttttctgtttttcttcttgtgagagaaggttgacatatcactacctctcaactcgaacgaatatgaagagttgaatgtcgttaagggttgggaaagacctcacgagcgcacagcactgcaaggggaatgaatgtcttcctggtcctgcgctgagtcagagagtggcgctgtctcagaagctccgccatgattcgcgccccttgctttattttacacatattttcatatttttatcctctggtaagttaactgtacatgtcacttatgtgattatgtgtaatcaccattgtctggttttcatttgtaggaagaaaaaaagaagtttgacaaagagacggaaaagaattacagtctcatcgacaagcacttgacgctgtctgccaggaagaaggactcacacttgcaggaggtattcctgacaggttcttgtggatttgcccttttaaaagtgtattttacctgtgagaacttttcacctgagattgtgtaggcacaggaaaaagcagatggcgcagtgaattcggagtggggttctgtgaaacggggcagcgatggaggtcctacagtattgattgataagaatgaatgttaggctctgaggttttcacaggagcgatgttagtcagtgttggaggggacacatacagctactcatacagggcacagtggcacacacctctagtcccagcattcgtgaggcagaagcaggcagagctctgtgagttcaccgccagcctggtctagacagtggattccaggacagccagggctacacagaaaaatgcttcttgaaaacttaaaaaaaaaaaaaaacacacacacacacaagaaagccccaaacaaagcccacacagtagacaaagctagtcctgtttttggctttcacgttgtcttgatgaatcggactgtgtgagcccacactctgtctcttagatgtgagaacaccattagtctcggagagccagggagcgtcctgttgacaagtggatctgttctactgctgttaataggctgagtttgctgctgctgctgctgctgctgcttctgctgctgctgctgctgctgctgctgcttcttcttcttcttcttcttcttnnnnnnnnnnnnnnnnnnnnnnnnnnnnnnnnnnnnnnnnnnnnnnnnnnnnnnnnnnnnnnnnnnnnnnnnnnnnnnnnnnnnnnnnnnnnnnnnnnnnnnnnnnnnnnnnnnnnnnnnnnnnnnnnnnnnnnnnnnnnnnnnnnnnnnnnnnnnnnnnnnnnnnnnnnnnnnnnnnnnnnnnnnctttccacactttcaaccctcttaaccctggttattagagaaaaagaataaaaaggaaaagggtcaatgttattgttaaattacttcctgttgatttgggcattgagttacttggcacaagtttgatcttctctgtcaggaatatttcccctccctccctccctccctccctcccccctctttcttcttcttcttcttcttcttcttcttcttcttcttcttcttcttacttcttcttcttcttcttcttcttcttcttcttctccttctccttctccttctccttctgcttctccttctccttctcctcctcctcctccttctcctcctcctcctccttctcctccttgtcctcttccttctcctccttctcctccttctcctcctccttctcctgctcctcctcctcctcttccttctcctgctcctcctcctcctcctcttccttctcctcctcctccttctccttcttctctcctcctcctcctcctccttcttcttttccttcttctctcctcctcctcctcctcagtatgcaagcagaaaggaatttatatcttatctcagcttccccaggtttttctaaatttttttgacttttttcctccctttcctaggcttgactaataacagttatttataataggcttttaaaagatctcttttactttttaaaaattacatatatatatatgtatatatgggggaatctgtacatatgaatgccagtgtatgtgtacatgtgtacacatgactgccagtgcccacagaggccagaagagtggtgaatcctctggagctggagttcctgttggtgtgacccgcctggccaggagtgctgggagcacgacttacataagatcagcatgcacttcttttttctgaagaaatagttctttatcgttgagaacacacacacactcacacaccacacaaacatgaagtatgatcatatgatcatatatacactctccatttcccttcagctactgaagacctcaatacctcaatagtcaatactgagtgtcttataccttaaacactcagccacctctttagcctagaaccgaagttttattagcaataatgtgatgtgccatataggattatgacttcccaacaaaagcataaaactgctttctgtccgtttgcttgttcttaaacacaaacgaacctgggcataatgttctacagtgtatgtatttgttgacatagcacccagaggataatagtaggaaatcaagcttgtatgcttttctgacagactccacgagggcacacgttgttgtttgacatctacaagtgatatttccttttgtgtttattatacctttgatgtttggatgatatttcatagtttataaagagaagatagcttttgtattgattatgcctcactacagtgnnnnnnnnnnnnnnnnnnnnnnnnnnnnnnnnnnnnnnnnnnnnnnnnnnnnnnnnnnnnnnnnnnnnnnnnnnnnnnnnnnnnnnnnnnnnnnnnnnnnnnnnnnnnnnnnnnnnnnnnnnnnnnnnnnnnnnnnnnnnnnnnnnnnnnnnnnnnnnnnnnnnnnnnnnnnnnnnnnnnnnnnnnnnnnnnnnnnnnnnnnnnnnnnnnnnnnnnnnnnnnnnnnnnnnnnnnnnnnnnnnnnnnnnnnnnnnnnnnnnnnnnnnnnnnnnnnnnnnnnnnnnnnnnnnnnnnnnnnnnnnnnnnnnnnnnnnnnnnnnnnnnnnnnnnnnnnnnnnnnnnnnnnnnnnnnnnnnnnnnnnnnnnnnnnnnnnnnnnnnnnnnnnnnnnnnnnnnnnnnnnnnnnnnnnnnnnnnnnnnnnnnnnnnnnnnnnnnnnnnnnnnnnnnnnnnnnnnnnnnnnnnnnnnnnnnnnnnnnnnnnnnnnnnnnnnnnnnnnnnnnnnnnnnnnnnnnnnnnnnnnnnnnnnnnnnnnnnnnnnnnnnnnnnnnnnnnnnnnnnnnnnnnnnnnnnnnnnnnnnnnnnnnnnnnnnnnnnnnnnnnnnnnnnnnnnnnnnnnnnnnnnnnnnnnnnnnnnnnnnnnnnnnnnnnnnnnnnnnnnnnnnnnnnnnnnnnnnnnnnnnnnnnnnnnnnnnnnnnnnnnnnnnnnnnnnnnnnnnnnnnnnnnnnnnnnnnnnnnnnnnnnnnnnnnnnnnnnnnnnnnnnnnnnnnnnnnnnnnnnnnnnnnnnnnnnnnnnnnnnnnnnnnnnnnnnnnnnnnnnnnnnnnnnnccccccccccccccagtctgttcggcaagggcagctgttgactttttggtctactgctgttttcgcccctcttctccattatctgcattctcactttcaattacttcagagaggatttttatgcctcaaactaatttccacctccacatcactttaattagacatcttgttctaaacgtttctcgtgtataatgcaggaggcagcctcggcccccacactccacctccttccaccagcacgtggccccttctcattcctctttgaaagccctggagatggtgacttcagaagccatagggccatgcaatgtacacctgcccaggacctcatgtgtcatgcacttgcacacctgctcaggaccctgtgtgccatgcactgcacacctgcccaggactctttgtgccatgcattgcacacctgctcagagtaagcccgtttctttctggggcttgcaccctttaccacagaggcataccctgacccctgcctactatgtcttaactcagatccacatgtgtgtctccttcagatactggctcaaatagcttctactcaggtcatgtgtgttatggtaataattaatttcaatcggggtttctaccctacttttgatcactaggttcccagataaaaggcactcaacctttatatttatcataaacctttaaagcaccagagctgggcagatactacccagaatctatgctgtttattatgactacgtccctgccagtaaccctgcgatatgatttgccatggctggctgggcagctcttactctgattggtcagttctcatgatcccttatcccacagtatcttctctcccctgtggtcctctcctcagacccccaacccccggaacccacctctcctgcccagcagctaaaggagcaaggtttcctagcagcacctggatgccataagggtctcctcgtccctggggcagccagggccagtatttagcattacaatgcataacagatcagagctccttccagctctctgtccacacggcctcctcttctggcttattgttcttacgcttcctaggtagtgttgcatggctcccttcagtgaccgtatgccctctgaaggctacagttcagagtcctctatccattctgcctagaatagtgctgtcagagcgagaaccacaaacaggatgtgtgcacagtgaggtatggctttggcagtgtcatcagtctcagagatgagtaaactgcaagtcctgagcttgaagaggcgctgaagacggcacttccagtttcatttctgttttgctctctctactcttcacagtcgtacagatgcccacttgaaaacagctctcttgttcatcatgtagaccctaaagagcgcagagacttgtaagccattctgccctcttgttgatacgaggagagtagggctgttgcagcagcgtgcctggtgttgatacgaggagagtagggctgttgcagcagcgtgcctggtgttgatacgaggagagtagggctgttgcagcatgcctggtgttggtcatttttgtatctctcctcgaagctgctgctcccgccttgtgggtctcagacacaaggaccttcacctccacccaccacccacgttcctgagttctagacagcctctgtactacaacacatactggctctgggagaagattacatccttcttggtttttaatgcttgttttcccccaggagacaaaggatactatttcagtttaaatatcactaaagaaataatattttagtaatattgcatgagattgatctcctgtcttctgcatgtatagaattacaattggattataatacacagttgtttattcattcattcattcattcagcttttgcttactgtgtgtgcaagctcattttgtattgttataaaactcctatggatggagagtttataaacaaaacagatttatttagctcatagttctggagagctgagagtatgacattggcgtctgcttggctttgatggggtcctcactgtggtcatgtgcttcatgtgacagtgtttatgtaagagattcaggggaggtaccaggcttcttaacacaatgtagtctcgtgggaattcgtccacttccatgagatcttaatccctccaacagtagtgcctccatgaccccggagcaggcctcgtttcttgaagattccatcacccccaagaatgacgtgtcagaggccaggctttacagggcatatgtaggccatgtccaaatcgtaacatggcgggaaaagttagtgcattgtagactcgaatcgttctgtgctcctatgtacacttggaatattgtggcgagctcactgtgagctcgggaatctggagagggaatcatacagtggagggcccagccgctctggctgctcagaacgttcagatgcaaggtgctcagcagagtgagggcaagtcataccgaggacacgtgagggcatgactctccgctctgcaggcagtgatgcctcatgagcgtcacgtgagccaaccactgctttcaactccacagtttaactgctcagcgggattaagggttttggctttgggttatactgttggtaggtgaataatgagacacaaaacgtcatggcttttaggtagaagctcttattttgctcacttgacatttaaactttatgttactcaaagactttcaattaaaagtaccagacaaatactacacttgtttttataaacttctgaaaatgtgttggaaaatatttatcttcttccagtttattttagccattcgaatattgcgcaggcattggctaactgctttacctggctgtgtagccgttccccaccagtctccagacctttgtgcctagccaagcagaagccctgactgggaagccgtgacttcccctgggctcccagccctaccgtccgtccttctgtcattctgctggtctgtcgtagctccctcatgtgtaggagtttctctttttatgtctgatgtgcattgcctttcatctgagagcctaagagtccatccatgtgtgccataccgggatctgcttccttttttttttttaaagccacgatcttgctgtgtagtccagtctagccctggacatgtcctcctgccgtagcttcccaagtgctggcgttatagctgttcatgttacccaatatgatttgtccccttttgttatatttcatcgtgtgtagtgtgtgtgcgcctgtgtgtggatgcgtgcgcgtgtgtgtgtgtgtgtgtgtgcaggtggtgtcgacggggcttttgactgttccaggaagaagtgttttccttaatcttcagtctttgagggtcatcaagctcttctctagagtttgggaagacttttctgtatgtccttgtagcagtggctctgtcctgctgtggcaggagagtaacaatgagtaagacatgagttctaacacaagtttataaaagccccgcaccacggccagcaccaggccattgacctccagcttgatagctccctgccgtggggtcaactcacagtgcttgttttaacacaggccgacctccaagtggagcagaaccggcagcatttctacgagctctcgcttgaatatgtgtgcaagctccaggaaatccaagaaagaaagaagttcgagtttgtggagcctgtgagtagcaggacactcgttgctgtggatccttgtgaaaacactaagggagacctcacaggttgtcaagggtggacacagctagggaaagtctagagaaacatctaaaccgttgggaggccctgttggcacagcttcctcctcaccccagtgaggggcacagcccccccgccataccgtgacccctgtccccactctgttacaggcatggcgatagacctttatgtgggtgctagggaatttgaactcacaacttgttcataattttctgtacagaccacctatttacagttatttaatttctagtgacttctttggaactactttcatttcaggacgtgacagacagggaggtggttgggtgctccggatggcagtgctctggatggtggttttgatgcaggcgttgcttgcttccttccttgcatgcactaactaacgctcctctcctttgtcatagatgctgtccttctttcagggaatgttcactttctatcatcaaggccacgagctttccaaagacttcaatcactacaagatggaactacaaatcaacattcagaatgtaaggaaaggaaagccttctggtatttaaaagatgtttggggtgcagctctttttctactctggtctcaaaatcttattaagaccaggctggtatactgagaaagtggggatgtgttgccatctagtggtcaactttggtgtaacacatggctctgaagctgatgaggctccaggaattctgccctttggaggcccttccttggctctctggggcaaattcttggggtaaacttggttatgttagctctgagttgttgtgtaacaacccgctatcctggccttccacctggcgttcctgactgaccgtcagtcatggtttttcattccccagactggcttatggaatttctccgtccctacattttgggcatgctctctgatgtatctgtgtccacagctgccagttttccttgctgtcctttgttcaacctgatgatgaaaaatgacgtttggagattcctactatgattgctatgattgctttaggctgagatggctcagtgggtaaagtgtttgccgtgtgaccctgagttcgaatcccaggacccatgcaaagccaattggcgaactgtgccataatctcaggggaggagaaaaggactctcaggggctcagttggcctgtgagtgcgacactaacaaccagagacacgcctcatgtgttccagtccacttcaacattgttccgatggtaggggacttactttttctgtacgtgtggtttatgtgcaggccagaggctgctcacttctgtctctctcagttgcctctctcagttgcctgatcttctgagacacagtctctcattgaatgggaggctcaccaattgtgtgggctggttggttagagagctccagtctcacccgtcccaccatcctgtgatctctgcccctacagtgttacagacatggggatagatctttatgtaggtgctagggaattcaaactcacagctctatatttgcatggcagacatttcttcagcccactagaaagtttaatgaaatgaattatttttcagagtaacttgtaggctataaaacaacttgtgaagagagactagttgagaagattatagactgatccccattcccaactggtatataattatagaattaaccttttttttttttcttagaccaggggttctctactttgctagtgcagttcctcacattgtagtgacctgaaacataaaattatttcctttgctacttcataactgtaattgtgctactgttatgagtcctaatgccaatatctgtgttttctgatggtcttaggcaaccctgtgaaagggccctttgacccctggagtggtggcctataggctgagaaccgctgttctagactttatttgtcaacttcagggctgaccagatgagaaccccagttaggcctgatgtatgtattatgggactcgtgtaaaatgagaacagaaccccacattaaaaacaatgaagactttcaagatggtgggtattgatactcagtgtggtgtttcttgcttgtcatcccagtgggaggtggaggcaggaggatcaggagttcaaggctatgtagtgattttgagagcagcctgagccacatgcgatgctctctcaggccttccctcctgttatatcataggacattaagcctgtcctgagaccctgtgtcacaggccctgtgtgacagtacagcctcctgccagggaagccatctcgatttagcccaggctctggaatgacacaggaacccagcatctcctggggctctggtcagccgtcctcacattccttccttttataatgtacctgtggcaaagagggactccagggactgagccatgtcgagcgaggcatgagatgctggtgagcaaaacccgcagaggggagatatatttacttattatgccttggtaatacgtggtgagctgagagcttgcacggctgacagcaacacccgtcctttattgtgagtagagtgggcaaggactttctggagaggaaacattttttcctatatattttggaattcagagatatgtattcatcaggaattgccccaaatcctctctctattctagctaccttataaatatccctcagttttattctgctctctgaggcttcttgggtgtcactcatttggaagttgttcttttgccctcattttcaggaccatgggtgtgtgtgtgcgtgtgccctcacgtgtgcacgcttgcatgtgtgtgttgcacgtgcctccccctggctgctgctgtagagcacgagtgtgagccccacgctcctgccttgtctctgctttcagccaccttctccacttcagccacgcgccataggctctccctcgaaaggaccgtcattacttctttttttcggctattcatcttattctctctctctcttttttttttcatcttattctcttgtggtttttaattttttttaaataagggcagatactgactgtataaagccacacatttctgaaagaaaaccctggttatattttattttttaataccaaccacactgaaatgataaaactgaattttaaggttagatatctttatgacattatagttaattttgtcagctgtttagaattttattacagtaaaataattaaatttaaaatgactcttatgctcagaaagagaggtaatcttatttaaaaatgaaagcaagctatttccagccccatctggctatgccttttatattgtaaaaatggctgggctttccttaagggatttgctttttacccatttttctgtaatctggagtaataaatagaaagcaagaaagtagcaagatggcttttagaaagagtgttttttccccaaaggaaaggaaattgtatcaaaatgaaaggatattttagaaagctcgctttgcacttttgtgacgccatcctagaagtcctggcagagaaagcaggaggggtgtcgggattatcaggaagcctccaggtgatagatgaagtaggtaagagtgtggggtctcctgtttaactatagaagaataacaacgactcctttccctgtgctcgttactgtgataaatgacttcctccaccgggagcagacagctgtcctaacatctgtgacactggggtgcagggaggtcacttccttctctcagaccctccagaggacgcttgctcacagacctgtgctgcttagtctcagatttcacaagttcttaattggtaagcctgggatttggcactactggcaaaccttgtctctgactccaggagtctgaggagtccagagattctcatttgctgtgttttggagtcttaaggcctgatcagtgattctcctggatctgccagcccactctttcttttcctcctcatcctccatatgtatagaactcttgagaggatatgaggttttagtgaggtccgcctgcctgtctgtctgtccgtccgcctgcccgcccgcctgccagtctgtctgtcttgggaactatacttttctggttttgtttgtttctgtaaggtgaaatcctctcatgctgtctcctctgccttcttttgttctgagtgatgtcatggctgagatggataaaccttactgagttaaggtggtcgacacttggaatcctcccccacccctgctttgcccctcccttccaaggcttatttgagggcgtcttagttctattatgatgaccaaggtaacttatagacaaaagagcttatttgggctcttatttgggttcctgaaagttggcgtctctgatggcatagcagaggtggcaggcgtagcagctggagcatagcagagctgagggtttgtatcctgaactagaaacacaaagccaagagcacggagctcagaactgcatcaggctttgtaacctccaagccctgggacacacttcatcaggcaaggccacacctcctaatcctcccaaacacctgggtagtgtgctcgccccccccccccccccccccttagccttatccagacattctgattaaaggcatctgactcccatcttggagcctcagtggactctggctgtaaggcaaggcttaccataggctggttttcttgacagtgttcccaaacaagaggtgggaagcacactcccattgctgtgctcctggcatcagatgacactggccagcatctgtcatattttttttttttttgagatgttttactgcctgtcacaatttaatttattattttatttgcagtgctgattaaacccacagtcatcatgtatggcaaagcaaactgtatatcctgagctatacctctaacctcaggtaccattggaagttatttgattcagtttatgaccaaattcagtgtttagtgtccttctgattaaagcacatcttccagggtccctcgagattagaactgagaatcgctaggttgtaggtagtctattaattgatgttagaaacctgaaatttctaccctaatttataattaacataaagaaatacggcatattttacaaataaccctgcttattctggtgcaaaggcacgaggaagcgggggcccccaggcagcgtgagcgctgtgtggaacttattggtatgcagtcaggtttttatagtatatcaatagtggctccattgtatatgcatatgctagccagtgagaatgtgagtatgtgcataagactgtatgcacgagtgtatgtgactgcctctgtgtgtgtgtgtcccaagtctgcctgcacagaagtctgagatggagcagcggctgtgagcacactgtacctggtacagagttagacgcctccttccatcgaaagcagcagggctccctcggagaaacggtacattctgggtcagggacgggtacaatagatcagcctgggattccccactagaagcagatgagaaactgctcagaggattaaaggcatgaggtctgctggctagctggacacctgtaggacatttagggcagtagcattaagcaacaggagatcatcgtgggtgaagccactggactagatctgttgtacacgtttgtggaggaagtgaggtttgggaggaatcttaccgcaatgaataatgccaatgtaaaatcagtggaaacagacacagacatgggagatgctgcaggtggtgacatggaggaaaaccagacctctttatagtcctgtgtgtgtgtgtgtgtgtgtgtgtgtgtgtgtgtgtgtgtgtgtgtgtgtgtgtatcagtgtatgaatgaatggatgtatttacttactagacagggtttctctgtgtagcattgtgtgtgtacatgtatatatatttatatataataaataaataaaaacaaataaataaacaaacaaataaacaaatacaaatgagtagccctgtattctttgtgtagccctggctgtcctggaactttctctgtagaccaggctggcctcaaactaagagatctgaactgctgggattaaaggtacgcaccacctagccttgctctgtattttcctaaagggcataaaaaagttcttttttctttctctattggctcttagtttctgtttaaataaccctctggaagtagttttatgttttatagtccatgtttcttgatcccccatccctaggaggaaggaaccagggcgccagcattttgctttcttctgtcctcaggagccatggtggcccctttcattgtaggtaggagagaggagaaattttagtaataattttctgtctgagcccctttgcaatttcacagcagcagctatttggtatcaagacagttatttttgagcctggctgcaagaaatacccataagctgggtggtgactcactgcgtggcctgcgactgctctgtctcttcagctcgcatggtgtgtcctgagcatcccttagcaggtattggcagcccatgtctcctgagtttccaaaatgccacgagctgctttagctgcctggacattatctgcccgtgggaccttactcctcctcgcttctctcagggaagaaatgtcatcttctagtggcattaccacagtcagaaaaaactgttactaactttgttgttgttgttgttgttagcttggaaagagtgattattttcagatcctcagtgttcagattgctgttgtagtagtactagcttgggtcaggtcattcgtttcgaacannnnnnnnnnnnnnnnnnnnnnnnnnnnnnnnnnnnnnnnnnnnnnnnnnnnnnncccccccccgtagatggctcttttatggcttatttactctttacatctaaggttaacaaagtcaggaaacaggaggcgcacggcctctctggtgccaccagctcaccctctcgattgactgttttacactctgtcatcttcggatatcaatctcagtaaggacacacactggaaagaagaaacatttttttgagttctacagatttaattttagtttcatagagacatcaaaatgtatgcacacacaaaaaaatcatagatgttggaatctgtatttttttttctttttcagacacggaatcgatttgagggaaccagatcagaagtggaggaacttatgaataaaattagacaaaatcccaaggaccagaagcgagccagccagttcacagcagaaggctacctgtacgtccaggagaaaagtaagaggagggtgttggatgccttcgatctgaagagtcgggtggttgtgagccaaatgcaggttctcagcaggagtggaaagtgctctgaagcgctgagccacctccccagcccctgaaggcacagcgtgcacacattcctgcttctgcagtagcatggagctccgcagccacgggctgccacatgctatctagtgatgtgctccaggagtttgctgcctttgtttctgaggaaagtgaggttagaggtaacaacagccaggagggactatgtcaccagcacctttctgctctttcctcttcccattccttctcagccccggccactgctatgtctgttattagggaaggtgctggagggatgattcagcagagttgagtgcctagcacccgctccttgtagctcaccaggggaatctaatgcctctggctccgtgagcatcttcactcacatagacacacctagacacatagtaaaaatcttaaaagatactaggaataccgtggatggttatagaaaccagtgctacccagcagcattttacttacagagactttagtgttgggtcgcctgtccttgtgtatcttataacaaagcacttgagacctggatgtcgtataaaaaagtgactcatgtggctcatgtttttggtggttgggaagtgacccatagctccatcacattgtgacaaagaagcgggagtcagatagctgcatgtataagggcttcacctgagatagcctgctgtggcctgggaagctgcttagctggtaaagcgcctgcactacaaacaagcctgaggatccgagttgagatcctcagcacccgtcaaaaagttgaggtgtcctcacgagtatcccatgctcgtgctgtgctgatgtggggaagaggacatccttggtcctcactgggccggccagtctaggctctgagtttaatggagaccttgtcttcaaaagataaggtggaacactcaggaggcagaggcaggtggatctctgtgagttccaggccagcctggtctacagagtgagttccaggacagccagggctacacagggaaaccctgtcttgaaaaacaccctcctcccccatctccaaaaaaaaaaaggtaaggtggaaagtaatcatgggtagtggaagacatctattgtcagccctggactcatgtatccatgaacgtgtgcacacacacacacacacaccccacacagactgttctcatgggaactaacccattgagaactctgctaattccttgttggggtggtgccccatcatccagtcagtctcagtgtggtagagttaggatcgtggttcagcctccgactcttcgggatgtagaataatcattgtaccgttgctttgtccaggtacagctcagagggcttcttagttgggaaattaaagaaaccaaagctcgttcaaagttctgagtcgaattcttctgtttccctccttctgacccttagctttgctcagggttacacacttttcttccgttggttacatgtggccgacttagctgacttccacactgaccagctgggaagtagaggattgtgggagaagtagtgctgtcttatgtgttgatccgaagctaagtaggcagcaggatggtgtgcgcccactgtttaatccgtagtgcctgaggagctcttgggtgttgtagcacatacagagtatgtcatttattggggttattactattgagtgtggatgtggctgagcacctgggctggagcatgtgtggggtcaggggacagctttcaggagctgcttctctctttccgttgtagcatctggggattgagctcaggtcaccaggtttgagctataagtaacttacacgttgagtcaccttggtgtgtatgtgtatatgtgtgtgtgtgtgtgtgtgtgtgtgtgtgtgtgtgtgtatgcatgtgcgtgtgtgtctgtgtgtgtacatgtgtgtgcatgtgtctatgtgtacacgtgtgtgcatgtgtatgtgtgtacgtgtgtgcgtgcatgtgtgtgcacgtgtgtgtgcacgtgtatacatgtgtgtgcatgtgtacacatgtgtacatgtgtatgcatgtgtgtgtgtacacatgtgtgcgtgtgtctgtgtgtgcacgtgtatgtatttgcgcgtgtgtgtgcatgcgtgtgcacgtgtgtgtgggtgtgtgtcccgacacagagtttcttatagagatctgcctgtttctgcctcctgtacgctgaggttagaggtgtgggtccccaagcttggttgagcccctgcccctctatgctttccctggctgagcagggcagtaatgtgttctcactgtgtctgcttcctcacgaggaaaaccacaaagatctgtgctttgttgaagggcctgctccatttgggtccagttgggtcaaacactactgcatgtaccggaaaacagccaagaaattcaacatgattccatttgagcacagatctggggggaaactggtaagtatttgataggagttattttgttttatatgagaaatacttgctgggtctgtcattttagtagtatcatgttttgagtttcatattttcatattgagacatttggtttcagaattaaaatctttgttttgtttctaaatcacactcctcagtcttcacagttagattctttaacaaagaggagtcttaaagactggtcactgttttagaagagaagactacttcctatgctaggcgtttgtgactcgttgaccacccctgttcacatagaagatctggcgtgtttgcatgctgtccagtcacagtctgaaaacattgcaaggtggagcgacctttgagtgaatcaatcccctttcattcagttaggcacgcagaggtttcataaagtcattccctgtgagctcagttaggcacgcagagttttcataaggtcactccctgtgaatgtgagctagccgtgagctagctgctcagccaacgagatgaatagcagagccaagcacggcagaaagaccttgggagctggctgagtgaggaaggtaggcctctagctgtgaccagtgaatagctgtgagagattgcttaaggtgaacattggtgtctggggtagagcccttcccactaggagtgagcataactggccacacagtttaagaaagccagtcagtttgttgcttgctgggtgacattttgcttaggtgaattcagaaataatctggtttctgtctatgtaccttacactttgtccagaaacaaacaaaaaaccttaaagcaggttgtaagaaggggccttagtagcaatggatgtacatagaaaacagccacccagatgaggctgaggcaagctctgtctcttgtagaaggaggagttgtagcattggctttgagcctgagtttgctgttacagtaaattggggttttagggcagttctccttagtgatagcttccattttcggctccagatgaccaaatgaagcagtgtagagtatagctgtgatgttctgaacatttatctgggatcttataaagtatttttaacagatccccatatttcagagaatcccaggtgtggactttgctctttgctgagcccctgcatagcttctgtctttaccccagttctaatgctcttagggagggtgactcccagatccagtggttctgtgttgtgatcccagcagtatagtgaggtttcaggtcaatccttacggagttgtgtttacaagctagtagtggtcacactgataatggcacagggtgtaatacagtgtgacagtaaagtagattctggctccttacaaacgagcgcagaacctggacgctgctgaaatccttcctgcagtcctggagttttgaatattgtgcttatttgcagggggatggcgaggctttctttttgaaagaatgcaccaaaaggcacatggactccacggacagaaggttttgctttgacatcgaagctgctgacaggtaagggagtgggattaattagatatgatattaaaatgaatttgaaagtacggttttgaaaatgagtggccagcgtgatttctctgaactagaaaaatgcgcccttgttgtgtttccgggccatctttgttgtgaactgtcgttggtcactgtgtagttgtagggtcatagctctatcctggctgaagactggaatcattctaacctgtgctgtcacctggaggagaaacttggagcatttcattgttgccacacctctgattgacatcaggaagagagtaatgaaggagagcgtgggtggtgtgtggtaaagttagagacagtgctcgccatagcagcgtggaaatggcagccttgcgcacatctgagcgtatgttctcgtcatgaggttggcgatcataggcaaacccttccagtgaggtcaagccttttcttacaaaataacttcgaaacatttagttttcagtctttggcagagaggcagacaaaggagagacagtgcctggcagtaatgtctgtgtcctccaggagtgcccagtgctgcctgcgtgccaggcgcctactgaccctgctttggctgcaggagattttagataaagctatttggtgtgtgtagtaagtcttccaacggagaggattaagaacaaacttttcttttttcaggtcaaatgtaattgttgctgctttctttatgtgatctggccaagaatggagttagtacagagagggaaaggcccatgagtaaattcactgaagactagttgtataaaaatacgttcccttaagcaccctgccaaagttggcagtgctgtggcaagggcaagtagacagggagcgtttgccaagatcgcgggagaaagaatgcgttgtttgaaaagaggctaagatctaagtccgtcacgacaaactggtcctaagactctggtctgcgctactcagggagagcctgtgcccatgctacctcggacccagctctctctctctctgtccttgtgagcgttatctgccttgatcctcaccacacctcccaggtccgaagctgcagcaccaaggggttcagggaggccctgagaccttgcagatgtgaagagttgagatttgaacttgtacattctgcccggaaggacaagtcttttaaaactactgtgttacagggcccagcagacttctgtagagtcgggcttctgcttaaatcgtcgacacagatgaatcggaagtctgctttgctggatggtgcgttaaatggagtaactcctttgagagcagctatcgctagtgctctcacgcaccatttgaatgagttttgtatttctgaagctcctacttttggagacactgatgatgctgtatgcttttagtcggccgtgatctttacatgattgtaagctgcagcctttctctcctactcagagagatagataaggggttactgctaaatcacctttatgtataaaggattaatttttttttaatgataaaggctaggttctgaacctagcctcaagaggtaggctaggctagcccacaatctctctttctcagtctcttcagtgctaggataatagacttgtaccctatatctggctaggataataactttaaaacagacgaagaactaaagcagaacttacaagaaacctattctactttttttttatatatatagcaaaaactgctcctttttgcaatacagctgaccttcacacatatataaaatcattctgaaagacagctctcttactgctctttaagttacttttctctcctgtgcccacctcggttcctaaggtctgttcagacccagagctcctgtttgtcttccctccctctctcctccctctgttgaggctcctgtaacccagtctgtctctgagctcccattgtcttctgcctctgcttcctaagtgcatgctggggttacaggctgtgctgctgtgtaggatgtaagcacattctttactgacaggccatcactcccagccttcctcaccttggctgttagtgggactgtggtccttaccggcattagtcaggggtctctagagtaacaatttatagaatgaataaatgaattaatttgtctgtctgtctgtcttatctaattatctatccatccatctatatctatatctatctatctatctatctatctatctatctatctatctatctatctatctacttaaagtaaatggaggccatctatctatctatctatctatctatctatctatctatctatctatctatctatctatctaaagtaaatggaggccagagagggcattggatcctcagaaactggagttgtagatggttgttgtctgccacatggatgctgggaatccaacatgggtcttctcaaacagtagcaagtactttcaacaatgagtcatttctacagcccctgtttatttttgttatgcttcgagtgtttgtttggatagatgtctgcgcatcgtatacatgttgtgtttaaaaaggccagaagagggcgtcaggtcccccgaaactagagctaaaagtgtgttgtgaacaggaatcaaaaccgggtcctctgtgaaagcagctgccgctcttaactgcagaaccatcgttccagcccccatgtacgtgttttgtgttattgttgtttccagcccccatgtacgtgttttgtgttgttgttgttgttgttgttgtattactgctgcctacggacctttaagaactgcgtacagttgcagatgccatcattcctcgcctccgcccacttgtatgttctcagtttggtagccatgttcattcccgcagctctcaactccctgcctcatgcatgcatggttctctcatctgtcatttagaaagtcatcttactatcagtgaacctttttctccaccgcccattcctttccttccacatcagtgcaaactcctcagaaagccattgatgtctctctcagatggctttccctattgttagcctgtcagaccctcagcctgccgcccctgcagggactttgtctgtgctgcagtattctctgcgggcaggcctgctgtcccctgtggtgcttcaggggtccatcttgtgctttcctccccttaatcttgttctccagctcattttccagatctgtagagtccactgggcttggtgtttgcagtcccgtatggccttgtctagctcatagtgttagggatacatttagtaacacacacacacacacacacacacacacacacacacaaattagtatttagtcactggtatatgttggaggtggctcgatgtgtttttccttctgtaaatttcagtctttatctgggcccctctctgtattcctgcctggagggctctgaggcatttcatagttgaggtcatatgttacttcttttatactttttccttcttttaggggtgggtctccaagacagggtttctctgtgtagccctggctgtcctggaactcagtctgtagacgaagctggccccagagattttcttgcctctgcctcctgagtgctgttaaaggtgtggccaccaccgcctggccgagtaactttttaaattgtcactagttttgggtgctgctgtgtgttcagggctcagtgcactgtggggagggggggtattgtgccagcaagtcattttcagagttcctgcttttttgtgttgaggggaaagtatattttgttgacgggacccagcattttatatacacatatgaattcagtcttacataaacactgatctgtaaatgttttaaaaagttttagttgcttaagttgtacctttttctaactctggttaatttggaaaattgttcataatcataatgcactttttaatgatttccttgggtcctcagaatgaatccaattgttatttttggattatagacgcctattgcttttggcttgatttcttcatttctcggttagagagcatctatctgtatttgctgttattagtatgtagtggtttctgggagaagatcttctcaccccaaactgtgttactcctgtgacgcaaactctagtgagctggggctggagaggtggctcagcggttaagagcatgcactggtgttgtgggtggggtctggagtttgattcccagcgcccacataaggcgatttgtagctggctctaacctctgctccaggggatttggcttcttcttctggcctctgtgggcaccacatttctgtgtgcatctccccaccccaacaaaaacacataatttaaaaaatcttagaaaaagcccagcggtttgggtatgagtgtgatggatgtacattgagatccgtaactctgaaaccctcaaggtattaattagaagctgaagtgcagtgggagctgctcttggtttttatcccccgggtttctggcccagaaggctatgaggaattgcaagtaatgcattctccttctgttagattatgaatcccacgagctggggctgtctcccttagtgtgacttggtacctcgctaacagatgtagtaccttgtggaaggtgggcattcaccagacttgtgccgtattagccagcgttgaatgctcctcaggagagacagcactgagactcgattgggccagggcccatcaggcagcacctttgtgtctcagtgtgagtccaggctcgctctctgcttacagaaaccagtgagaataggtttctgcagccaggcttggtggcacacgcctttaatcccagcactcaggaggcagaggcaggcggatttctgagttcaaggccagcctggtcaacaaagtgagttccaggacagccagggctatacagagaaaccctgtctcgaaaaccaaaaaaaaaaaggcttctgcatggttcctgttgaggtctttattgaatggcagtttcatagttgcttgcatgctcttaatctaagttttgccttctttccaagtatctgcttttgctattttgcatttttatgttagaagaagtggcattgcaggagaggcttcgtgagcccgggcaaacatttggtctaaaatagcagttaagagcttctctggagttgtatttctttcggatgaggcttggttagatttattgcttttggaaggagtcagcatgactttaaatagggttaatttgtcttttgttctgttggggaagccaaaggcagtcagccagggttgatgctaactaatattttgtatatgattttgcttccgtctgggcttggttcactttctcaggttcctcgggctcaggatccttgctcccgtgtttccgatagtgctgctgttatgaatagttttcagaggctgcccacgcttgcacaccagtgcccaatggaggggcagctaggctgtatcttgaggctggaatgttgcatctgtgtgtccagctgtccctgtgcagtgccgatgcttagacatttcactcctgagaaccaaggggactgtgagcagcagggggctgggtggaggccacaggccagtctcactgtgccctttgctacagatatttgtgctgtctttttttttcccccctccttcaattcacagaaaagttgctttgaatattttctttggtagagggaagcatttaagatgcacatacgtacatgtgaatggagtggcacatatgtccacacaaaacatttgaatggtaattcagaggtgcatttttcatagggccccaaaataggaatcccttgaacgtttgtagtgggcaaacaggagtggtgtattctcgtagtgagcagtgggcgtccacccagcctggagacggaacggctgctggagtgcttggagcaaaccctgaaagcataagataacctgcatcgtgcacttccacgtgtgcacttgtctggagcatgcaagtctgtttggacaaacagcagagcagggctgcacagaaatggggctgatggagaccttttcctcacgcatgaccagaaggccttcaaatggactgcgggatgaattgaatatattcacttacagtgaatcaagtatacagtgtgaattgtgtcacagtaaaacctcaagacaagcaaaaaccaaacacagtaacaacacagctgcaagtaaagaaagtccgccgatgccgtaaagcacaggcttcctcagggcagtctcattcaaacaccacgggctgacacgtgctgatgccactcatctttgattggagaaataggtttaatatagttgtttggttcagtgcaagccatggtctatcagggcatgtaacttaagacattgacagcaccacccctgcctcagcactttgttctggaacttgtagggatgcttaccttagtgctgtctcgtgctggggccatccttatctccttgaatcggcctgataaatactctcctgggcttttctgccacagcacatccaggttcttcgccgcgatgctgcctgctttgtgtctgcccacctgtcggttcagagcttgtactgtgtgacttttctgagcatatgatcagatgccttttatccccgcagtttacctgtttatattttagtgccaccaggcatagtgccctgtgttcctgaagcatgaggtggcgtggaaagcctgttcatcagcaacgcaggtctttgtgtgtgtgtgcagctctgttctttatgttctttatgttctttgtgtgtgtggcagctctgttctttatgtctttatgtctttatgtgtgtgcagctctgttctttatgttctttatgttctttatgtgtgtgtgcagctctgttcttcagactgaaagagttgggcatgttacttctgtaagttcataggattggtttgcacagtagcgagagtgcttgtgttgcacgctgagtggaatggtagctgttagctccgtctcagccatactgagggaggcaatgagtcaagagtcacctaaagtgatgaaagccccggacttccagcacatctcaggtcgaagtgcacatctcaggtcggagttcttttcaagcttagcgttggtgtgcagaagctagctgaccagtcttgctacacaaagtcactctttttcttttttttttttgtcataataaggtttgaactcacagagttgctaatgctttgccattgagcttctgagctaccagccgacagtctccagaccttttctgatacagggtcttgctgagttgctcaccttggcctcagacttctttgcctgcctctcaagttcctggaattataggtgcatactattaagtcctgctgagaaatgactttttaaaaaaagattttttatttattttatgtatataagtatactgtagctggctgtcttcagacacaccagagacaggcattagatcccactatagatggctgtgagccaccataggattgctgggaattgaactcaggacnnnnnnnnnnnnnnnnnnnnnnnnnnnnnnnnnnnnnnnnnnnnnnnnnnnnnnnnnnnnnnnnnnnnnnnnnnnnnnnnnnnnnnnnnnnnnnnnnnnnnnnnnnnnnnnnnnnnnnnnnnnnnnnnnnnnnnnnnnnnnnnnnnnnnnnnnnnnnnnnnnnnnnnnnnnnnnnnnnnnnnnnnnnnnnnnnnnnnnnnnnnnnnnnnnnnnnnnnggagagggaggaggaggaggaggccacgacgacggtcactgcagacatcttctgggtagaggcctgaagtgtatgaactggcatccagacacacagtgtcatctgttcaatatactgttcagttactattgagaagttactgcatttgatgagacagatgcccatgaatgtttgtagaattatattgtttcatggaaatatatgtatgcagtgtacatttccaggaaacagtgctccagtagtttaacttggctatagtacaaataatgacttaaaggtgaatagtgagtcgtataaaaatttaagtttctttttaaaaacactaagtatttatttaaaaaaaaaacaaataaaacaaaatttcttagtagacttggtaaggcacataccagggagatttaaaaacatttctgaggcctctgcttttcagcgtatagagttttaggctgaaagtgatttcgtaggtagtcatacattgatagccatattttatattgattctcgcacttagatgtggattagcattagttggggttagtcttgaaatgtgtgtggaaagacagtgctccatgggtcggagcaatgcttagtttctgtgcggaaagcattgacaaccagggtttcagagagacaagctttcagtttctgttcctctggggtagacacctgcaccagaagtgctaggtttggacactgaggctatgaattctttatcaaatgtatgggaagcctccctttaaaaataattggcagactttttcactatgagatttttgtatacaccaaattcacaaagaacttgcctatttttttaaagtgaaaaaccattataattaatgtataacttgtagagagttggcaggcactgtgaatgataacaggcttgtttatttttctcatacagataaccagtatttgtgacactgaacattggcggagactcgagtcggatttagctcttttattcctttcaggaatggcttggctgtgtgtgggcagaggtgaggggtgaggatgcagatccgcactgtcacccttagcagtccgagggaccaagtttcacagggacctcagcttagccaagccaggagtcacggccttgacacagaaaggaatctcgggaccgtcaacatgaggcagaagagttgtcttaaaaatagagatgtgtacaaagagggaaaacacacccaagaacatggcctaggcgtgggatcggaaggagccacagttgattgataggaatgttacggggctgaagagacggcgcagcagttaagagcactgacttcccttgcagaggacccgggttcagttctaggatctccatgtcataaccatctatagttccagcactagagaatctcatgtcctcttctaacttctggggcacctggcatgcatatataatgtactgcatacacacaggcaaacactcacataaaagcccataaaattaaaatatgtagatgagataaatagatgctcaggaaaagagtaagatctacccatgggtagaggtgggctctggaggaaaagttgagatttagtgtctttgcactcctatgggtaccattcaccccactggctctcaagttacagcttggaaagtagctgagggccctctctccccccaataagtgaaactagacggtgtctcctagggttccttggatggaattaaaatctggtagcataaaactaggagccactagggttgcgcaaaaggtctctggtgagagttttagagaatggacaggctgtcggctgtcaagggaagaaggcctcactaacctgttaactgtgtgagaatgcttgcttctcagctggtgggaagcttcggttaaactcttttcctgtctcagttcccccactttggagacttcaattccttgatcttaaggattgttgagggcagatgatagttttctgtatccacactgatagggatatagaccctgtgtaatggcagaatctgtagtctcaactggtctgatttcttgtcttataaacgagagagccatcattggaatggagtcatcactcaggtctcagatcgcacacgtactagcgcatgtcatgcagagagtaacacccagaacagcagagcctctcctatgacattccttgaagccacattactagcaagtagccacgattcaagtagattaatttgtgtgtagatcttggaggactgaggacacggcgcctcagttgtcaggcagtgtacccagaactcttgcctgagagagttgctcaagggccactgggtcttgtaggtagtggtccccatcttaacgtgagttaggaagtgtgacctcacagtctgtgaaaagaacatagtcacaaaagtacagatttaagaaagaaagcagtggtggaattaatgaaatacacagtcatcgagtgtatcaatggtgtcagaaaatagtaaagcaaacagcaaaataaggtcattgttatcaagaaacttatgaaagaaatgggagtttctgttatatcatgaagtcctttctcttgtttgatgggaactcctcaattttaatgtttccaggggcacaaaggcattgagggtgggactgaggctgtggagactcagaaaggagaagtggcactgtagaccagtggttctcatccttcctaatactgcgaccctttaatacagttcgtcatgtggtgactcccaaccataagatgatttctttgctgcttcatgactgtaattttactaccattatgaattgtaatgtaaatatctgctatgcaggatatcggatccttgtgaaaagatcattcaacccccaaaggggtcttgacccacaggctgagagccactgccatagataacacatcattgaattcttttactcaggctgggaaggcctttatccgaggttttcatggctggagagtgtttggactaaagataaatggtcctctttccccagaatgtgactgttctaacccagtacgttaaggaaagggcagtagcttagcttccccgttgggctattacagaggaagaacagacaagcatttaaggttttggggaggattgggggtggggcaggagaggggaggatcttgaattttattgtcctttctctaaaaggcacttgactctaatcaatgtcagtttttctagatgacacaagtcatgaaggcctttacattttttaagacaacagacatctattgcatctattaatcatattctcctttctgcttttgtataagatgaatttatactaggttttgggaaagctgtctcagagccttgtctgtagtcttagaacattactgtaaactgttagagttggaacattttggctgtttcagctacagtcttttaaaaaacaaaatgaagacttccccaggctaagtgtggcaatagcttctttggcatttgggcgttcctgtgcacaccgactactataccagtttattcagacaggaagattacggtatttaaaaagacagtgaacaaaaaccccatactgaaaaggaaccggtttcccatgtcaagggtcactggaggcacccgatgacatctgacatcggtccagagcactttgtcaaggagttttgaacagcttcttttagaagtgccatcacgggctggagagatggctcagcagttaagagcactgactactcttctaaaggtcctgagttcaaatcccagcaaccacatggtggctcacagccattcggaatgagatcggatgcccttttctggtgtgtctgaaaacagctatagtgttcttacatataataaataaataaatctttaaaaaaaaagaaaaaaagaagtagtgccatcacgggagttgagagtccactccagggcttccaccattgggccttgtaaccatttacctccttctgtaggggcaaagctctgtttcttagaacagcagtgggaagagttgtattgctctttggtagttcaagtgactgtcctttgcggcatggaagacagtggtaggcgctagaagtggctggtcacatccacagtcaggaagcttagactgtggtgggtgctgctcggcctgcattctccttgtaacacagtccaggactccagccccagcagtggtgctgccgaacgtttcggttccagaggcagcccttcactggcgtgcccagaggctcagttctcaggtgaatgtagaccccatcaaattgagactgcctctcacgctagggcctgcagagcctgcggtggagcacaacatatcctagtttattactatcgtcatttgcattggtagggacataagcagaacctgtcacgcgtgttaccaccactgctgctacttttagagtaagtgtgcgggaagaggctgaggtgcttctgaagttcaggtactgcttccagctgtgtgcgcatgcccacagtttccaattccaactgtgcgctctacagatagccacaatggcctgaaggaaagaatgatttgtaggcataatttttctcaagctaccttaataagtgttcaacttcctctctagctcaccacccaccagaggaagtggaaaagaaaggttattagaatgtggggaaagtggacctgtttaggaatagttctttgtggggcgagtccagtcttccttgtcaggatatcagcatctcaccctctagcaaacaccgacatgaatcagcagctgcaggccagtccactcagcagacaccaaccttgaggggcagttaaatccagaagaaaccacaagactcaccaagcagccagggtcagtggaagtggcaagaagccccaggaatctcatgagaagttctttggcaactttttccattatcgagccagcacaagcaaggctcagcagagcaatgtaaggcgaaccaatacatgcgtgtcatcagtgaaaaatagtggggcagagcaaagcaaaccaaagctcgagctcccactgtctgtggggtcatatttatattccttctaaacaccacgcatcctttcacatgtctgctttagcaaaacatccttttacctgtgtgccccagcaaaacatcatttgacataacccactttccaaagaaaccagaagtttctacttcaatgaaagcctggacagctcattccctgtttctgattcattttctcttctaggaaattcattgtgttgctttcgtgtttagcaaggctcactgtgatgcatgattggagcttggtatagtgtgtggtacctggtaggcatgattaataagagatcagtcatgtccgcagttcagccagtgagtgagcgtttgcccagcagtacagttgactcctaagaaccccaaggtagacctttgctattgtgtatcagtggcatcaacagagcttcttcatgagtgtctgctgtgtgaaccttgttcaattcgtgtgttcatgtgttttcttatacttgctttattgtcctatatagtcactaaatttaattttagtcttagtcttttctttccataactcaagacttttgtcgttaatagagcgttgcttcagcaggtaaagaattgccgtttgctgttgctagtgattcatctctctgtaagagatccatggagcaagaggtttcttaccactgcgttgttgactataatgcatggacacccttctgcagttttcctgatgaggagtggggctcatctttatgcgtgcctgctgctctctgcctgccttccaatgtctttgctttcttctctttttaacaattgcttctgtagttctggctttttcagacttgccatatacttgaaatgatgcaccgtgtagccctccgtggtggacttctttcactgagtaataatgaacttgctgtcttttcggggtgtgctggtgtgtttgtttgattgctgagaagtacacttgtacgggttcctgcacccctcacctactgaaggacattttgatgcttcccatttgcagaggctgtgaataaatcttgtatagatggacacagatcttaataactctgtacagactgaactaagaaatgtctggctatgtctgtaggaagccagagagctgtctgacattctttgcatcattctatgtcattggtattgatgggtgagagttcctttgttccacatcctcatcaacatttgctgttctcagtacttttgactctggctattccagtcagtgtgctgtcattatgtattaattggcttatctttgttggaaattagggtgggaaacatcatgtatacgtacagaaaagtatcattcagtcttaagaaggaagattggtgatgcgtgttctgactgagaggaaacttgtatttaaaaaagctggttagaaactatgagtaggatgtggtttcttgttttatggttctgagattatccagatttgtagagatacagtatataataggaattgccataggatgaggaacagtgaataggaaatagtgtttagtggtatagagaggtttacttttgtaagatcacaacatctctggcctggcacagaaaggtgcacttgtggtcccagcactcaggtgatggggacaagaatagattgaattcaagaccagcttgagctacatggtaagacacccctcccgcaatattctggaggtgaatcattggggtggctgtacaataatgtgtttttgtttaaaagtggcctaaatagcaaattttacatattatattttttattgtagttgaaaatgaatgaaacctttaatttatatagtcagacctttggaagcagaggagagggtttgcgttgtcactaggtgacctgtgttttcctggtgtttttcaggcctggcgtccccttgaccgtgcaggcgttttcagaagaagagaggaagcagtggttggaagctctgggtggaaaagaagctgtaagaacaccgtggctgcagctctagttcagatacactcagctggcttgcttcatccccatgtcatttttcttttatgatgtttgagaacagttccttgctggagctggtgtttgaacgcatcttggaactgtattggcactcctgtagtttatcttggtcagctgcagcacatgcacactggggccattattcatttccagttctgattttttttttcttgactttgtcactctgattggctttgctttgaaaaagtcagcaaaactctcaacttctcctattttacacaagtgggttttttttttttttttgacaagtgtattgaatgcttgcagtgtgctttagattgtggagatgggtcaataagtgcatggcagtagaaactgctgcccatatcgggctgatatttaacggtggatatactgtaatggtttctactttgtagtgtagaattgcttcagagtggcctctctatttttcatttgcttcaaggagtagactaaaggttatgacactgggctggaggcacctggattctgacggttggcactcggtcccagcactgatttctcttctgtgtgctgctggctgttggggcacagagtctggcagatctcgtatggggttcgggattcagtaaaggcaacttgaggaggaaccacagatgctctttcagtgttgccgcgcaaagtgctctgattccaagtcagctgccagagcaggtaccacccggcctgcttggcctaggaagacttgggggggggggcatgatctgaagatggaagaggagttctatacagtcagcaaggaggtttcagaatggagctgtctcagagcgtgtaacacggtgctgctttcggctggtggctcagccgcaggggcattgtcgaaagcccagggaactcgaggctggctggtagactgtgtgccagtcgtgaggtgatggctgccgaaaatgaaaacccagctactatgttttgaagcttgatgctgtttaagaagtgtatctctgggtaaaattatccagcatcagatttataggttgtcatatctgagctggagtcagacttctgtctatttgattctatccggtttgggtgctaaggatagannnnnnnnnnnnnnnnnnnnnnnnnnnnnnnnnnnnnnnnnnnnnnnnnnnnnnnnnnnnnnnnnnnnnnnnnnnnnnnnnnnnnnnnnnnnnnnnnnnnnnnnnnnnnnnnnnnnnnnnnnnnnnnnnnnnnnnnnnnnnnnnnnnnnnnnnnnnnnnnnnnnnnnnnnnnnnnnnnnnnnnnnnnnnnnnnnnnnnnnnnnnnnnnnnnnnnnnnnnnnnnnnnnnnnnnnnnnnnnnnnnnnnnnnnnnnnnnnnnnnnnnnnnnnnnnnnnnnnnnnnnnnnnnnnnnnnnnnnnnnnnnnnnnnnnnnnnnnnnnnnnnnnnnnnnnnnnnnnnnnnnnnnnnnnnnnnnnnnnnnnnnnnnnnnnnnnnnnnnnnnnnnnnnnnnnnnnnnnnnnnnnnnnnnnnnnnnnnnnnnnnnnnnnnnnnnnnnnnnnnnnnnnnnnnnnnnnnnnnnnnnnnnnnnnnnnnnnnnnnnnnnnnnnnnnnnnnnnnnnnnnnnnnnnnnnnnnnnnnnnnnnnnnnnnnnnnnnnnnnnnnnnnnnnnnnnnnnnnnnnnnnnnnnnnnnnnnnnnnnnnnnnnnnnnnnnnnnnnnnnnnnnnnnnnnnnnnnnnnnnnnnnnnnnnnnnnnnnnnnnnnnnnnnnnnnnnnnnnnnnnnnnnnnnnnnnnnnnnnnnnnnnnnnnnnnnnnnnnnnnnnnnnnnnnnnnnnnnnnnctccctccctccctccctccctccctccctccctcccttccttccttcctaagatttatttatttattttatgtatgtaattacactgaagctgtatagatggttgtgagccttcatgtggttgttgggaattgaattttaagacctctgctcactctggtcagccctgctctctcagtccctgcttgcttcagcccaaagatttatttattattatacataagtacactgtagctctcttcagacgcaccagaagaggacatcagatctcattacgggtggttgtgagccaccatgtggtttctggcatttgaactcaggaccttcggaagagcagtcagtgctcttacccactgagccatctcaccagcccctgaacatttctttaatcctggcacttgggaggtggagttagtatccgagttcaagaccagcctggcttgtatagttttccaggatagccagggctacacagagatctccctaataattaaagaatcttgatagtgttagagatctagttctgctaatcctttaatccctttttttaataacccggatgatcaccccagagcctttagaaatactttagatagtgaatttgcatagaaaaaataccaccatggttgagcctttgtaagaaaagtgagcttctggtttggcttagtcttgaactcatgatctgcttgacttgccctgtaaagagccgagccactgacagacaacagaagaatgtggagagatgctgatcagcgatacatttgcatagggactgtgaggcacagcggatttcttccctgtgctgtgtgtcttgcaaatagtgagccagttcaaggagcagaattaccgtggtactaacacagatgcattcactgtgtgcaaggattatccattgcttacataaataccagggttagaaacaggaagcagtggactagacattactgggagttttgatagaggttggaatggagcagtttgtcagcctgtctctgtaaggtggaacttttcccgtttacatagacttgtgacaagttcattagagactgcagactctttgatctcatttttgccagcttggcatgtctctggaagagtagagtagattgagagttacttatttttgtatatgagtgcatgatagcatgccattagaccgtacagctcatctggcctgtgtcctcacacaggttctccatggaggattttcccacactatgtctgacactagctggatgtccccaagttcagttcaactctgatactgctgtctgtggtgttggtggcagatcttacaagttgggggtgcagatctggaaggctccctctgcttcagtcttggtagcacagtatgatgtgaatttgagatcccatgaccccttccttggctgtagtagttggctctcagcactcaggggaaaagtgtacttggtcgtgtcttatagagcatgttacagcctgagcaggcataaggagccatgcatagggtgggttgtaaagtgagtgtatgtgtatgtgtgtgtgtgtgtgtgtgtgtgctcgaggagctcccgtgccctgtaggagtgccactgtcctagcatttgatgcgttcatccagggaaactgagcaaatcctgctgacgcattgtaaacttctaccccaggcggtcattggatgactctgaatgtcttaatccatctgtcactgtggtgtagctagttgcatgctacctaggtttccattttctaattattgttcaagtaagtttagagctgtcccagagagctcctggatagcaaaacctttctatctgaaaattccaggtgtaggaattctatgctgtaaagcagggacaaagactatatttatcttttatatgctacatggtctaatgctaaatttacaaaaatgacagtttgtgtgttctcacttgactgactctgaggtaatctgctgagagtgttttctttgtttctttctctctttcactagctgttccacacgtttaacagagccattgtcccgagaccggaaggaggtgagtgttcccttatcctgtttgttaccaaccccaagctgttgctggttctgtgtgcaccgtctttatgcccatcgggtagcctcattgtttgtccccttgagctttactgtaattctcctgcagtcttgctgtgtatgtctacagtcatgagtgatgacgggcagctttccaggaggcagtgtagctttctgagcttccagagtctttgcaaggggtggtccttggtcctctgcttctaggcttcctcatcctgccatttgtcattctagagagaagtaagcagattctccaggccatagtgcagagttgagaatagcaggttgctcttgctcatggtcctacgcatgccgtaggccttcaggcattttttcagtgaggctgaggagaggagagagttctctcggcaagtgtgagaattacttcatatagtttaaaatagccatccttggccacaatgagtaataaaaagcaagagtggccccagcctgatggtgaacctctggttgctgggagtgagcacttgtcatataaggcggttctgtgcagggcgggcttcgggcagtgaggactgagaagtccttcagaagctcctggctttattctcttgcttggactgacttttgagcacccatgttctcctgttacaccttgaaactctctggccttgcagctaaagcatgcgctcgctcttcaggacgcatgcacttgggaagcagcagcagcagcaacagcagggaggtgctgaggtgctgagctttttacacacagcacatgaaggatctgccaagtcaaggttgtgcttagcagagccacaggaaacgctgtctgatgtacacagggcttcaaaacagttgccattacctgggctcattcttgaatcaaagactaaagatctgcagcctggccccggatgctgacagatgtcccgcagcagggcgtgtcctcacaggcagcttctcagctgtgcgtttctctctctttactttatcttcagtcttccatcccttacattcctctccttcttcctggtcttcccctttttttgtctctgctctttatcatgaagatgttgaatcttgcctcttctggagttggctttgcaaagcaggaggaaacaacttgcgttttatataatgttagccatagtcggttcttgaaagcttcgttcagttttcaccattgaaattcactttcagcatagtgatgcatattctgaaccaagtttatatgcaaggactgtaaatccccatgaagccagcaccaatgccacagtcccttgggccctggagcagtggctggagatgctgctttctttcattgagttttgaagcaaaagcaagatctctaaatatatgccagcttggtcataagcaaacatttatattagaaaaagcagttctagcacatgaatcatctgtttcagttcaaagtatgaaaataataatgtcattaaaaaagcttggtgaattgtataaattatcaaaattttaacttaagcttattgcccagcatttaacaaaaacctttcttaaaccttttgtccctgtgttagacagaagctcagatgctcactgaaagccttcgagcacatttgtgggtttccttagctcaatactcttagagttttcggcaaaattcagactatttttaggtagcttccctttgagattgctattattttcttttactgtttaagataatccatactgatcaacttaaaattttatttatgatttgaattataaactgataattggccatcttggtatgcatcgtggagactctcctataaatacataacttttccgtctatgtcggttacacggcaaagatgtggctttcagcagttttaaaacagtgaaacaaaagttacattaccttaattctttccttctttttgtaagggaaagaaatccagtgactacctgcccttgacatcttctaactgtttgtttaggtgcacagctggataagatgggattcacaattctcagaaaatgcatcagcgccgttgaaacccgaggtaacggtcatgctctgcccgcagctttattcatggagacccgtaggtatggaacacccgagcgagcctgtcacagccctcggctacgcgctacaccaggagctttactgcagagcatggtcagttactcctgcaatgatggcgggagtccctcgacgctttccatgtaaatgtgggaaaacttcactgcagtaacagatgaagtcatagttaaaatagaatcacatcttcttgtagccctatcatcacagaaaataccacagagtggatggcccaagtggaagtgtatcctcacggttcaggaggtggggggctgagcacaggaggtgccagggttagttttctcttagcctgtgccctcggcttgtagatggaatccccttgctgtgcctttcctgtgtgtgtacatacatgtcctttctgtgtgcatacatgtcctttctgtgtgcaaacatgtcccttctgtgtgcatacatgtctcttctgtgtgtatatgtccctcctgagtgcatacatgtcccttctgtcttttttgtgcatttagaatttctctctcttttttttaaataaggattcatgccatggttggggcagtggagtgtatgtgaatgtgtgtgtgtgagtgtgtgtgtgtgtgtgtgtgtgnnnnnnnnnnnnnnnnnnnngcgcgcacgcttgagcttatgtacacacgcaacttactctaataccctaaccacctccttaaaggcccccccctttttttttaatgttacattctgaggttctgaggttgaaaactttatgggatacaattcagctcattctttggaagaatcagcagttggagaactaattcttagcacattttgttcaagtgccttattgctggttttcttactcttttggaatgccattaaaagtgatcttttcgggctggggttaagctcagtggtagaagctgggatgtgccaagccctgtgtctgacttttagccacatacatatgcacatacattcttactgagggagaaatttgaagttcagtgatcttttaaaatatactatttgtgtgaattgtttgcggattttatacctctgtgtcatgtatttgatcgtattcgccgccacactcctaacttctcctggagccacacctacctccttccagcttatgtgcacagccctttcaggtcatctactgaagccagtccggcggccccatactcacgtgtgggactgtgcaggttagtgtctcatcgacgtaatacgagctaccgtcatctcagaggagggggcctcagtctggaaatgcctccataagatggggctgcaggcaagcctgtcagccatgttcttaattagtgattgctgggggtgggggagtccagcccttggtgagtggtgccactcctgggctgaccgtcctaggtgttagaagaaagcaggctgagaaagccaagaggattcatctagtgaactatgttcctccatggtctctgcatcagctcctgcctccaggtttctgtcctgcttggtttcctgtcctctcttacttttgtaatggtgccacggacagacgcctaagccaataaaccctttccttcccgacttgtttgtgttcacagtgtttgatcccagcagcagtgacagacagaaaccactcagtgcagtgtgctggacccaccaggggccacactgtaaaagcacactgactgtccctagaggccatcagctgtccacagctgctcacatagaggtggggctagaaacttactgacattaactccccagatgttttgagtttcagtctgcacagtcgggctaatggtagacttttgatttctgccgtgttcccttctgtgccttcgtagtcacctgtcattcccaccttggtctttggtttctaccgacctgatttttttctcttcagttgctgtagtgaaagattgaatgcttgctcggcggagtcttaaatgcagttgatagtctttcggatcctagttctgtttaacacagggctttgaggttttttttttgttttgtttttttgtttttttgtgctctgtggatcactaattactgctttttaattcatatcccacctgcaccaagatcagagaaatgtcaaaattttgctgtagccatcagcactccgagaaaaggtaatattttatagtaatcttattttagataaaaaccttctagatcagaaagtgatacaaacactaacacctctccgactgggtggggcaggtattctgggtttgctgcatctcagaatcagtcaaaccgctcttatttgctcataaaattacacggtgtataggcgtcagattcttcatccagccgcagggtgagaaacttatgtcttatccaacacttgttgccaacttctgctgcacgtccatcccagtgaacctttaacactgccgagtcggcctctggtacacaggccgacttagttgctgatggtgtgacctgggaagtggctacttcaggctcaccgcatgattacggtgcactgataaagcattgtcctaggaaaagcattgtgtgtgttggagaaacagggtgcacgcgtactacctttagtattgctagtggcctgctacctgggatcttttttcttaacttttcctaaaacacagtccaatttaatcctagataaaatggaaatgttctgaagaagatagcatagtgctttttttccttagtaacagataacccatcatggtttagccctagtgccagtcaggtggaagccagtctgttaactaggatttattgagcagtctcaaggtgtacagagcctagctctgggcctttggaatagatagtaaacgctggctccatatacctgtaaaccagtcatggtagacagagcagaaagatttgtaagcaattgaattattccaggagctaaaataaaaaatgtagcacgcttgcacagattaggagaaccttggtgtgtgacagaccatgggttggaaggcctcagtgctaatggaggactggggtttaggaatgggctttcttagatcaaaaggatgcggattatatcctggcattcagagacttatcagctaagatgtaggcggaatgtagctgggggtgttcaaacttgattgggaaggaaacacagagggtcagtcagtactgaaagcttgtacataatgcatttccacacaacggtgaaggtgcgggctccgtgctagggggcgctaaagagcaagcaggcttacagaggttcttatgaaaggaagtggctggggtgtgtgcagacgcttcagaggctggactgctccctaagtaaggggaccaagttggcagaggcgcacatagttcagagccaccaagtgacatcattggagttctgttggtcacgaagtgcttggagactcaccggattgctgcaaggactttgggacgcaaagaggactaaagccacagagacatttgtgacacatccttgctgcgttttgtgactgtgggttccaagtgtgttggggaccattgttggtgtctgctttaggcagtgaaacccgagaggagtagagcagctgcagagttagaggaggctgtcagggcacaggaacaacaaccatggtttctgtgtgagtgatgtgtgaaacctattcactgggtcccaggggctttggagattgtaagaatcaggtagggacttatgggaaagcgaatctcagtgtgtcaagctgagagaatcaaactgagatgccatgcagatgagcccaggggagttgaggggcatctgcctagttcttgctcatccataccctgtgcttcgctgtagcccctcccttctgtactctctcacatctacttcctgtaagcccatggggggggggtagctcactcgtcctcaatgacgaggagtgccagcgttttggggccattttacccaagccttcattccttgcctagttggaggagagcttccctgtgcagctgtggtgttgactcttggggtgaagcacaactgctctgcatgtgtttctgagagagatgatggcttagcattctcctttgtcctctagagcatccttattcgtggaggcctggagggtccaccctctataaataagtaaccaaacaaataagtaaatctttttggctctcagttttgaaggtaccagtctgtgatcagttgatctggtagctttggacctatggtgaagtagcacagcacacatggactgtgtagtgatgtaaaaccactcagcatatggctagaaagcaaagaaaacaacgtggaagacttccacagacctcttccaggcctcagtagggctggcctaggaacctcctgctaagccttgcttcctagatgccagtcctccaataatacatagaccttggaaggcattctgcttctgtcctcccaaggctcctgcttggctcatactttgaaatgcattctcagagtccaaggttggaactctcacagctttgctcagaattcaagacttaaaaactacgtggggccccatggccaggaggcaaaaggatgtctccaactgttggtctgaattctacaggggaagaagacttgtccaggttcccgctgcccagggaataaaggtgctggtgtttgaatgaatgtgctgggcctggggtctgagtcaagtgagactgggcaggcagggcaggaggatagtggagcaggctctcgaaggagttgccttgcctctgagtgaccggaagcggtgaggtctaagctcctgtgaggtagaggaacgcttctataaagagtgtgacaggagtttgtctgtatgctttcatgcgcctggtttgtggagaagagatgagctagctttaggacaccctgtgctctctgccattttctcttttttttttttcctctgtgtgtgtgtgtgtgtgtgtgtgtgtgtgtgtgtgtgtgtctgtgtctgtgtctgtgtgtgtgtacttatcctgagacatttgtactctccctctgttgctcacaccctggttttgttcattatatttcctgtgtttattttgtttaagaatctactgtttccttggaatggagaaatgtcttccttatcctttgtatgcctcttgtttctgtccacacacagcgccatgcgtgtagaaagcattcagtaagcaattgctttggcctgggcattgaagagagagaaccaacatatcatattggcaagttgacaaactactggttataaaattattggaagggttggttttctttatgtggttagaatgaatatttccatgtagcatatataggagtttatgttagcatctttatgaattatgggtaatatagaagacagagaaagatcatcttgcatatggaagagagtgaagtattttagagcgtgaaatatgcttacataattttctcaagtaaataactccccttcctagggaggaaacatgcccagtacatttgtttttcttgatgggcacacataacacctaattttgaggtatatatatactataatgcaaaatcagtaattcttttttttttcttaaaaaacatcttagttgctgttttttaaatagtcattatgttaaaactaaatttgtatgtcactcttgtttatgaagtttctctttaaaatcttccatatgtgtgtaatttgaatattcactttacttttctagagcatggcattaaaatattggtgtaggcaagctgtcagttatcaaactcaacattgtagcaagctgtgaattcatgggatagaaaagacatgacagaccttgatttgtcacatctaagtgattctcttccttcgaacatttttggagaattctcctgacattggcttgggcattgtgctgtttccatatagtgatcaactgatgtgggggcccaggacgaattttcccagaagataatgtgtggtttcattattaaactttgtaggtgtgtttgggtggtaaggtgcccaggtgaactggcagcatttgaccatgattgcacaataatctcacattgccaagggcaaaccccatgtgacatgaagaaaataaagaacagctgtccccagaaaacttacacaagcaaacagctttctcattcgccatctctgttttaatcagcatgggtgcgaggttgagagtgggcgggagcagaggacagtctcgtgtgggaggagctgctgagagctagaggtgtctgcagagctgcaaatgcatccctgaaattctgcagccaggcctaccatgcctgagggagggagctggagagctgccagatgcctgcagcaccacagaggcaaggctgaaattgtgcagccgggcgaggcaggccagcgtagtcatcgccacaattgacaccttgctcatcttcagaaaactcacttgcagaagctgttagctttaaataaaggactgaactaaactaataagggtaaatgtttgctaagtggaggactgatccatgtccctgctaacctcatgtccctgtagtggaaggttgatgtgtggttgtgaattcttttcttcttcagtggccccctttttttttttcagttaagaactcttcagcttttcttcctcctttgtttatctgtggttttcttcacaccccttaaccctggagtccatgcagtaggagtgaactttgtctagtaattacatgatgtagctttgggtatatatggggctggatgtagcacaggggcaagaaaccagcaatagctgattttcaagtcgtgctgggactgcgtttagacagaaaacttgagaacttggtcgagttctcttggtaaaatgttttgctacaggttagtggtcttgattttgtgtgttgacaccaaaatcggatccgtttgtgacgttttatcttaatgcctttattttcctagagcagtggctaaccgtggactctaaatcggggcctcactagcggctcagcttgaatgttatcagcacgctcatgttttcatcttcctctcactgtctgtgaaggaggctgtgcctgtgtctcctctctatccttgttgtggtaatggtacaagttgaatgtcccctcacacccccgacacggaggtaaatcggttctactgatccttgggaagtaccagcattgattcaaggctgtcggcacactgagggacctttaatgaatatttctttctcctcatgacagcttacaaaggggaacggctcccctgagttcctgggactcagtcatcttgtgtgtctttgctaacgagcagcagaattaactgataggatttgcaccctttctggtccttgttatgatgtgcttacttgagcagcaggctgtctcgactaccaaaagggacagagggcgaagaaaggaagatgctcggaagaacactgtggctattgcattgtcttgggctcccagaacattcacagaaggggagatgagggtgagatttgtgctggttacctggaattgatcattacctggtgtcgtggctgccttgaaaacagatggcagcttcaaggcaaggctgatgctttggtctgcgtggggaaggaatgaagcgaggcttccaaagagcaggagccaacttctgccttgtgcccgaggctctcttctaatttatgttagtcgaaattttccatcgcttgcacccgagttgtgcatattgtgatgactgtatttggctatcccatccatctcagcttactttatacttagacgttcctggccacgtgtgtgactgctgtgcttcagtcatgctataggaaagataccggaggattaggatggggctcagtccaattctgcattcctcttatgagtgatcccatgcagtttcttgaagacaggtagaggaaaaaagnnnnnnnnnnnnnnnnnnnngaagatgctcggaagaacactgtggctattgcattgtcttgggctcccagcaacattcacagaaggggagatgagggtgagatttgtgctggttacctggaattgatcattacctggtgtcgtggctgccttgaaaacagatggcagcttcaaggcaaggctgatgctttggtctgcgtggggaaggaatgaagcgaggcttccaaagagcaggagccaacttctgccttgtgcccgaggctctcttctaatttatgttagtcgaaattttccatcgcttgcacccgagttgtgcatattgtgatgactgtatttggctatcccatccatctcagcttactttatacttagacgttcctggccacgtgtgtgactgctgtgcttcagtcatgctataggaaagatactggaggattaggatggggctcagtccaattctgcattcctcttatgagtgatcccatgcagtttcttgaagacaggtagaggaaaaaaggctcttgaagtagggaccactgtccacccacatgtgagcctcaggtgcagtagggacaactgtctgtctacatgtgagcctcagttgcagtagggacaactgtccatctgcatgtgagcctcaattgcagtagggacaactgtccatctgcatgtgaacctcagttgcagtagggacaaatgtccatttgcatgtgaacctcagttgcagtagggacaactgtccatttgcatgtgaacctcagttgcagtagggacaactgtccatttgcatgtgaacctcaattgcagtagggacaactgtccgtctgcatgtgagcctcagttgcagtagggaccactgtccgtctgcatgtgagcctcagttgcagtagggaccactgtccgtctgcatgtgagcctcagtttctagagtactgccttttgcttgcttcattcaccctcagttaccaagagcaaccaagagtaacatgtaactgccccttagggtaagcgtgggctgtgatatgggagaaaacccaagacatttaggtttccaatctcttctaatagtaagcaaaccctttcttccctataaaaggaaggggacgctatttctaaggctataggcagcctgctctatgctatagaggggcatattgaatcagaaggctctggggcaaggctttcctggctgtggtaggtggcttgtgtgagaaggtgctttgtgagcagttgaatgggccgggaccggtcttagctgctgggctgggttgtgtgtggcctccatagggtggcatgagatgttgacatgtttgaatagcagtgtgtcgaaactagcctggaaattggattcatgaggatcagataataaacgatggtgagcagaatggctgttaggatttccgacatgatttatacagggggtaatagtgatttaaatgaggatatttacagcatagagatgcttcaagaattgattatagaagtgttgtatggttgagcagtcatactcctgcttgtatggtcagaggaagtgaaagccagcaggccacatagacctgcatgttatgttctctgcaacattatgtagagtagccaagaaatgggagcaacctaagcatccagctgatggctggataaagaaagtgtagtttacatgtacatacggagagctgcttagccacaacaaaaatatggtcttgcctttcgcccggacaccaaagattactagatgaatgggaagtaagcctggcagagaaaggctggtaccagactgcatctctgtgacctcactcatagatgnnnnnnnnnnnnnnnnnnnntatgttagtcgaaattttcccatcgcttgcacccgaagttgtgcatattgtgatgactgtatttggctatccccatccatctcagcttactttatacttagacgttccctggccacgtgtgtgactgctgtgcttcagtcatgctataggaaagataccggaggattaggatggggctcagtccaattctgcattcctcttatgagtgatcccatgcagtttcttgaagacaggtagaggaaaaaaggctcttgaagtagggaccactgtccacccacatgtgagcctcagctgcagtagggacaactgtctgcatgtgagcctcagctgcagtagggacaactgtctgtctgcatgtgaacctcagttgcagtaggaacaactgtccatctgcatgtgagccttagttgcagtagggacaattgtctgcatgtgagcctcagttgcagtagggacaattgtctgcatgtgagcctcagtttctagagtactgccttttgcttgcttcattcaccctcagttaccaagagcaccaccaagagtaacatataactgcccctcagggtaagcgtgggctgtgatacgggagaaaacccaagacatttaggtttcaaatctcttctaatagtaagcaaaccctttcttccctataaaaggaaggggatgctatttctaaggctataggcagcctgctctatgctatagaggggcatattgaatcagaaggctctgtggcaaggctttcctggctgtggtgggtggcttgtgtgacaaggtgctttgtgagcagctgaatgggccaggaccgatcttagctgctgggctgggttgtgtgtggcctccatagggtggcatgagatattgacatgtttgaatagcagtgtgtcgaaactagcctggaaattggattcatgaggatcagataataaacgatggtgggcagaatggctgttaggatttccgacatgatttatacagggggtgatagtgatttaaatgagggtatgtacagcatagagatgcttcaagaattgattatagaagtgttgtatggttgagcagtcatactcctgcttgtatggtcagaggaagtgaaagccagcaggccacagtagccaagaaatgggagcaacctaagcatccagctgatggctggataaagaaagtgtagtttacatgtacatacggagagctgcttagccacaacagaaatgtggtcttgcctttggccccgacaccaaagattactagatgaatggaagtaagcccggcagagaaaggctggtaccagactgcatctctgtgacctcactcatagatgctctgaggaagtggctgtcacagaagtagggagtagaatcgtgggtaccataagctgggggtggaggcagtggccaagttagcatgacagaagttctgctgtgctgttgttgtggagcagggcgattgcaggaagaagtagtgaagtcagaggcaaagggttaaacgctttcaccttgaagaacattgcaggatggttatatataatgatgatgggaattctcattaaatatgtagatagaaatataatattgtgtgtatgtgctagtatgttggaaatagcaggcagggatgggcaagaggagacacttgacaggaagacagttggcctggtggccacaggaaggaaaggaagccaaccaacctcccaagcccaggtctgtggtgcgttagcccaggtctgtggttagcccaggtctgtggtgcgttagcccaggtctgtggttagcccaggtctgtggttagcccaggtctgtggtgcgttagcccaggtctgtggtgcgttagcccaggtctgtggttagcccaggtctgtggtgcgttagcccaggctgaggtttgagatgagcagtgagtttgtttttagatttttctgaatccaaggttcctgtgatatatgtgtaggaactcagttggagctgaggggagagaaggagaccatcactgaggtgaagagagaagggtcaaggaaccatggccacgggcataacgaggtcatcataggatctttatgagtctgtgttgcggggacaatagcaaggacaaaaacaaaggaaccgtaactaatcaaaggaaggatggctcatagctaagtggtagatcactcactcagcacacacaagacccctggtttaatccacagcatcttctgcccttcccaaaaaaaagaccattacagagagatcggtggagcacggtaagaaggcatccacacgggagaccgctgtccaacttgatcattccagaaaatttagacagaaggcaagcaacagcaacctcctcctccctgcaggtgggacttgtcctcatgggtttctcacaggagccctatgtgatggtaccctccccctggaggactcgggtggaaggacggatgcgattgattgaggagaccagaggagctgcacacagggcctcacactccagtgagcggcttaggtctgaactgtttaccacagcgagctcaaggagatggaagctccatgggctcatctttgaagagcgcattagaaggtgtggacactgggaaggaagagcagagggacagtgtgagtctgtctgtgctgggtacagactggaagtgaggacagtatgctcctgacactgcctcagtgtacacacactgcatggcctacgcagatgcttgggcggctgaagaaagatgtgcccagtgcttgaggagtgggatctgccttaaccactgtctaaatttcaagagagttgagttgttacatttatagactaccacaggtactctcagtctccaaacaactcaggaggttgttaagcaagtacattatagaataggcttggttctattggtggttcagaacaagttagaggaagcctgccgctgtctcatagctcccactggggacactgtgtggctcattccttttgttaagaatcagaccatgaggagagaccgatggacccacatggtgagtcatagctatggctgagatccagggacaggtagggcttagacttctgcagtttggaccctaggagttcttctgtgttctcctgaagctttgctttggtctctgtccaagcatttcccctggatggttgttcatgaaatagtgagccctggggctgtccaccctgaaagagagagcttttctctgttttgtatgaatgggaagtaagggcagccatattggtgtgtagtccatttgatctgccttcagaggtagcttttaataaactgcctgctgcatttgagactcagattagaggtggtaagctttgctgtatgtgcagagatcccagcttaggtctcgtgtttgccttgtgccttctccaactcgtgctgggttggaagtaggcatgggatgttggctaggcgtgtgggtcttcgttcctgtcacgaaccagactgcctatttcccgtgtgcagttacttgttggtttgggcggagaatgtcaagaaggaatagcatgtgccagcgaggacccccacaccacatatacaaagatggcacaaattggactcagtgggcatgcgtgtgggatgtgcgtaaggggtggagagcagacctgggaggtgtggggtgagcgtgacccggatgttttccatgcatgtatagagttgtcacagaactagtaagtgcattgtaaaagtgagagtgtaaaaatcaagtttaccccgaggacgggaggtagcagagatgctacccacggatgttagttgtcggtaatgctttgttttacacgggaactgggaaatctgaactcacaaccgtatgcttacagcataagttcgcttactaaaccatctccccagctcttgtctgtagtgttactttcctctatgctaattatctggtcaaaagacagaaaacgttggacatattacaggtgaacgggaattctgtattttctcactctatgcattgcattcattcatttattttgttccttggtgtgtatgtgtaagtcacaggacagcttgtgagttatgccttaccgccatgtgcgtaaggtctggtagctgaagtcaggttgttgggcttcctggccgtgtgcctttaaccactggaccatcctactggctgggagagacacattttccatgagtcatttctattaaataaatgttgattcgcatcctagcatgtgctgttattttataaatgtgggccatgaccagcatgtctttcatgtataataatatagctagctactttggaattaggtttaaaatttatagcacagttaaaaactaaacaagtgcttgacttttctctttgttagtgtctgcttgtttgttatataatgtaaccgcatctccttccctgcatcggaagtcccacctctccttagttccgcccctcttagttctaatatcctttgtgttttcctgatccttcctgtttgacatctgagggaaggaggagatgtacctgtcggtccgcacgaagtcgactggtcctctgaggggaagtgaggctgattataggaaagacagaaagaaagctcaagagacagctatgggagggctgcgcgggtcattaccatgccagccccaaatgtatttatcatagtcttcttatgctacagtaccctggaaagcaaagccacagctaacagaaacaatgctggtggaaatgtacacaagacagttgttctcacccaaaaaagccttccaaggccaatagaatctccagccctcagcctcgagcctcccgtgcaccccttctcattgttccttgcctcagcaggctgggaaatctgccaacagaccctgacctgccttgactgtgcctggcaggcagactttctctctctttttctctacttcagagaaatggcaaatgcctgtccaggagatcttcatcttccaagtctggttcttttctctggcctacccatttttcctgaagatggcaaagtcttattctttattcctgagtagagctctgtatgcgagcttgatcctgtagacaccattttcggggcttctttattgaggtcttatacctaccagccttccaacctgttcctctctaaacccttccaacccccaacactaggaatcaaagcttttatctgtaccgtgctctattaattcactcccgagtccctcacacccctctttcctattcccccgccccccccccctcaggattgtgaattcactgcctcctgttcatcatcgctcaccagtttagtgcacagccactccagtctttgctggtttctgggtggttctgccatccactttcatgcatcttttccttggtcccaggtgcccttgctttgcttccccttccctcctttgtctgcatgagccagtgggtgcagccagtgttagtagcttcacaaatgttccctggagccaagtggactctgcccgagcagcagcttccctcgaatgatgagaagagactgtaaacaggtgacacgaagatgggcatccctgtgtgatagcacgtggcagagcagactgtgggacagtcgtgctatgtgggacatattggatttcagcacacctgctgtcctcagaggctgcagctctaggcctctgtggaggtccggccatgattactttatgtctttgatgaagagaagggaaatgtttgtgtgtataaccactgtggaaatgacaatttttaacttagaaaattactactgtgcactagtgagcattcatgtccgggaaaatgaacgatagtttgtatactttaacttttttagcttagatttctgttttgccctaatctttagaagtttggtttaatttcaagacatacatatttgtgcccattgtttgtatacaagctaccacgaaaatagaacagaagacacaattaaatgagtatttttcttggtgagctatatactggggaggagaaacccatggtaaagtataggtctgcatttgtttaaagacttaagatgccacacatctgggggtttagattttttttaagttgaaagggaacgtgcaatacataattgtctagtatgaccgggtgtggtggcgcacacctttaatcccagcacttgggaggcagaggcaggtggatttctgagtttgaggccagcctggtctacaaagtgagttccaggacagccagggctatacagagaaaccctgcctcgaaaaaacaaaaaacaaaacaaacaaacaaaaattgactagtatgtgcttctttggattggcaaggtgggaacactgatttttaacacagtgaaaatagagttgaagttcttcattgagtgaaggaaataaggaattgacctggaaccaggccagctcctcagccttggtttcaggaattgtgacttaacagtgtggcttgtttaaaaatatatgaaacaacaaattggaaggaattaattgtgagttatgttaaaaaataaaaacaagaacagaaagcaaaaaaaaaaaaaaaacaggcagagttctgtgagatggtatgagaaaattgagtttttttctggattaggcttgaatgggaactcattttgctctttgccttgggaagccggagtcctacagggcacatgtttagtgaacagtcatggcacatgggaaggttggagcgtgaggtgatcagtggtcttggcagctgagataccagccgcagtgcagccacgaagcactgtctaagtgccagcatttgcaggtaacttcctgtagtctgagtaaaactcttcaagaggtacagtagatagatgggttggggccctgttgtggatgtgtagggtagatgggggtgggaggaccttacacagacgtttctgcaccagtgaaaaggtaagggtgttggtggaatggcttcaggctgtctctttatgaggatattgtaatggttagcatgcgctctgtgtgctctgcactggaagagtcttctagtgtcctctgacctggtgaatgtagacagataaggaagaactcaaggctgatttcaaaattgtaactttaggtgattggcataatcttttgattaaaagaaagaattttggaagaaaaggctggtgcagttgtgctaactcacctgtagtttggcatatcagttacatcttccaccatctatgactggtatgttgttgtgaacaggtatgtatgtgttcctggatggaaggtgtgctggttggtacgcagcctttaggaacagattaagaagaaacagaaaatcctataagaccggatgtctaatgtgccatttcctgtaagacctgatgtctaccgtgccatttccaacctgcctttggacaggttttatttacatttattggaaaagaggaaaaccgctgttgagcggtgtgattcttccttgcacttttattatgtgataattaactctagctctcgcaggttgatgaatttgaacctgattaattatccgatggtaattacaagctcagtgattaacattgctgaagcgacattcttaacttcgtctctgtgtgtttctgccacttttcataaatgctcgagtttgtttgaatgtgacttgctcttgacttcgctgaggtcaaactacttaaattctgcaggggggagggggggcctaaaatccttaggatgtgcccttagtgtgggaaggaaccgggctcagtcctttacccttttgtagactggatgttctgatcttgcttcttgaaagtttcctgtgttcttttctcctgtggataggggtgtgctctcctttcccctcagttgtagctatttctccttacggagggattctctgctgctggggtgaatcgtcactgttttggataagtgtgtctagactgtgggctagttctgccctcctggttccagtgtgacattgagagagaatggggtgtcagttgggctcaggctgtgacagcataggatcatatggtgcaggatttatacacagaagtcatttcctccactcccctgggagctcaaactttagtaagcctttcgcatggtttgttctgcatgtttccccctcgcctataggtggcagttgtcttcttatgtcttcatgtggtctgcttactcactgtctgttccagaaacccattcttctaagggtttaagccatgtatttgaagtttgtgcatcttttaaataacttctgtctaaacacggggatcctggagagaaggcttcatggttgggagcactggctgctcttctagaggatccaggttcgattcctagaacccacatggaggctctgctgtaaccagtcacagagaatgtggttgcctctttgggtattgcatgcacaagttgtatgcttgtatgtgtaggtaaaatacccatatacataaaaaataaaaataaaggtaaaaaagaattaaacacaggttggaactagaaatttaaagtagaagtttcacaatttggtctgtaactgatagcacctcctcagcctccatcaccacatccacactatttgagaagctataaaaataaataaggaagagctggggatatggttcagtggtacagcgcttgcctagcatgcttgaaggtttaattcatctcaatattgccaggaagaagtaaaaaggaaacgatcgtgtgggagtgatggctcagtgagttcagagcctccacacccttacccacacagaagccaagcatggcagtgtgcactgtagccacagtgctatgtggtacagatgatttgattcctatttctgcccagctagtctgtccataacagtgagttattggatcagagagaggccctgcctcagaaaatactgagatagagaagctgctgaggccaagacatcttgatgtcagcctttggcttccacgcatgcctacacacacacacacaaatggataagaggactgcatactgcaagagaaagaaaatactgattttgactgagtgatgaaagtttgtgagtatagtgtgctatgagttacaaacgtgtgttcacaccatcttcttcccatcccagtatagcacaggaaatgcttttccttgttcgtagaccacccagaaactggaagtgtcctgatgtgctcatgtctaggtagatctgaacccagacctttggaccctgcattagtcttgttccaccgcatgcagggaggttaagagtgtagtccctgtgagcagagcccgtgacctttggtgattaggtttttgtgttctgaaaagctagggattagagacacttcgctggcagccagtatgttcttgttagctttaacatttgtggtgcagaaagcaagcacggagaaagctgtaactctctgagaggaaagagacaaaggcacattttggaacgtcttatttgttagggaacatttcagacataaaaagtaatattgctatagtgagctcccagctcccagttcttaagtcctggttcaacagttgggtgagttttggaatgcttcatctgtccctttcttcccctcaaagcaaatctctcaaggaacatttaagatgtgccaatttaaaacacggacattttctcacctaacctgattccctcctgtagcttcctgatcacttctgagtgtcacttagctatgagagtccacatgaagacatttgttctacacatgctcaacacatgaagctatgctggagagtaacttctctttcctttgtcttttgtgttcaaggttttcaggtttcaacagagagtgaacacattaagttgaattatttattcatttcgatggagtttatggcaactctcttttttaaaaacacagattcagtgctggtcttcagaaatcatctaaacactttcttctgtatacctatccactttccaaaaaaaaaaaaaaaacccaagtaaataaataaacaaaaccatggaagtgcacctgtaggcactacatcaggctgtgcctcagcatggtctcataactgtgggcatccttatccatgtggaactctgctgcatgtggtcatctttgggtctcagctcacgtacgaagctaatatagcactttgacaatgaacacttgtttttgtcaaatatttttatagtctgcaggaatgctgctgttgcgagttatcagagattttggaatgcaactgtttgatagcttttgaaacacggtggtcttataacctgctaaccctttctctctctcaataggtataaatgaccaaggactgtacagagttgtgggggtgagttcaaaggtccagagacttctgagtatgttgatgggtatgcctctttaatcatttttccatgcattaactgtttatgctcattgactttgcaacttaatatttgatatatatgatgcacttaggaacacatcttctcttgtaccgcttacttgggtgggttgtgtcctcagcggaggctgagattatccacgttcctgggacttaataagcaggaggacagaagaatgcagctcataggtacatgcctctcacagtagagttggagtcaggcctctgtgctctgcatggtttccagattgcctgtccagaatcctgacagtacttttggttagacaagatcacggggactcgctcatttttagtttcgcagactgtcatctgtcagggagggcctgcgtctcggggattcgttgtttgcagttctcaccaggctcttctccagaaccatgctccatctgtgctgataacgcagcgttccttggcatcgcaggctggaggacgccaggagtgaattcatttcattgccccagacattctgtgaatgacacagcgctttgcattacctgctgctgtctgtgccatgcaacctgtaagatgcttcaaagtctcccctggcctagagcaggctgcccttgagggatggcctggctatcaaactaatctgtaattttggccttgctatgtaagaatttgatatctcactcttagttagtcaacaccaagcatgcccccaaggtgagctgggaactcatttgaatctgtttgtatgagaagctcactttggaaagtgtaaactaagatgaacaaaaccaagtgacaggttttgggtagcgctgcttcttgggtgttgtgtgaatcaagagtttcataaacaagcacgtttcaagccacggaccccaggaaaagttgccctttgtcacttgcatgttttgctagaatatattcacttatgtggctgtttccattttctgcctctcgtttaacttgggtatgcaattctggcagacatattttcctttttaccattagtgggctccagattaaatagtcaggttgccagtagtccgggagcagctggaagaatttattgggagtgcagcatctgcttttacttaattttaaaattagaaacactaacttggtgttacaatgcttaagactggataatgatgttattatcagaatacatttaagcaaaaaggcacattttggagtcagtcggtcaaagtgactctggctttatctgatcactactttgcgcacactcaaggaaactttgaacacaggtatctctgtgcttaccacgaagagtaaaattgtcttgaaatttgttcttaatctcacaaaattttacatgtacagcaccgtttagttctgatgggagttcctctgctcttgggaaaatcccaagacagtctccaactcgcagagtattttaaaattgcaaagccctcaaaagttcatgacttggaagggtctgggagatggctcagtagtgtttgcagaccaagcataaagacctgagtttagtttctaagacctacatagaagttacactcgtacacttgtaactccagtactcagttgtggggaagacaggcttgctggtcaataggtctaaacggtgaacccaaggttccattagagacactgtctcctcctcctcctcctcctcctcctcctcctcctcttcttctgcttcttcttcttcttcttcttcctcttcctcttcctcctcctcttcctcctcctcctcctcttcctcctcctcctcctcttcctcctcctcctcctccttcttcttctnnnnnnnnnnnnnnnnnnnnttctctccccttctccccctctcccttcctttccaaaaaaaaaaaaagccacagagaaagatgcttaatattaacctctgacccctgtatgtgcatgcatgtataagttcatctgcatgtaggtgtctgagcacacacatacaaataagcattgcttaaacatagacacctagaaaactgtcttttttcctttttcagagaagtccggacacaggcacgttaggacgtcattctgttgttggcagggaaaatggtgtgttttcagtcacattgagcaaacagaggaagttagagaattggtgcaaagatattaatttgttatttccctattaaataattcacttaagagggctctgcagtgtggatttcttaatctgtgggtaactggtaataggagtcagattgcccgaagtgtagccacaatgccacgctgagtcagtttgttactaatggaaaccttagctcttgacaaaatagatgccctcactgcttgctgatcaagttagagttctcttacggttctcctttcattctgaaaaggtatccagcatccacggattcagtatcactttaaaaagcattttagagctccagcaaacgtgtgtacacatctgcagatgttctcagtgacttttctgtttacattgtgttaaggttacatcctaaaggaggcagggcacgaacctgccaaatgcttaatttctttttcaagccaaccaatgtcttctgaggaattctcaaaagtaatatgtttgtttcaaatttgtaaatttttcagagcatattttactgataatggaattttcttcatgaaaaatgaaaactaattgaatttttaagcatcttggaaaaaccattttatgtttttagaagaaggcaatatttacttgagacctgtttagatattacagaaaaatgattaccattttaacatcaagttttaccatttctttttcaaatgtcttaagtattctctagacactcagatgtaaaagtttgtagtgattccccaaggcttgaattccgtttcatatcttgcatctcttgctgcctccctcccttccttcctgtgatgttttcccctttgctgtttacgattaaaatagataagaacatttctccattctgttcccctctccctttgccctaggacctcctcagctccttttccttccgaatcctctcctcaggctcgctaaccttcctcttctgtccacagatgtcaggagacattttcttctccttcagcccagggccaggagaagcctgtggaccaacacatggtgtcatctgtttccgctcccccgagccttgcactctctgagtgaccgctctccttctagggcgaagccaccttccttccttgcccccttgctgtctgtagtcagggagaaggtgttctttctttctctctttttaaaatattataagcacgtagctgactaggaaggcaaagagaaacagcagggggaacatcttggtgaataagtggcagttcttagtggggtaagagtgtgaagatgagttaccacggtgaggggcggataggaactggtatgaggtagaagcgcccggtggtagtctttctttttcccacattagaacaaaacctgggcagagcaggggaaacctggagaaactgtgctcttagcatgtctggtctgctggactttgctatttataagcttagtttacaaaagactaggtggtttttattgccttttagatacagaactgtagaaaacaaaaatagcagaattttaatttaaaatattttctcatttactttgttggacagttctgttacatagagcagagggaagtgagctcagcaactggaaacgatccgaggtgataaagcatatttacacaacacatgcgctccctgcttcttcaactctccaaaggaaagaaaatggcccacgtctgtggtggctagggcactgactccctgttagccagggtttgcagtgagcatggggcacacacctcggcttcgaggcagtgaccagtggccatgcaagaaggactcagtaagaaagtgccagctctttggttgtgtgcttgttagtttagatttctaactaatgcattatgctgttctttggtcagggaagaaacgcaagccccctcccttgtggaggaacacataccctgaatgaacactctaaacatattttaggtgtgaatcctaaataaactaacaaattccacttcgctcactgattgcgaaggactgccagggatgattgagctatttgaaaacagcgagcatttaatagatgattaattacatagacgtagtcattaacttctcaagtgacagctgcttttgttctgtgaatttagaaggatgacttagttttccatagaaagaatatgaatctcaaaataaagaatgataggttagtagaaactggaaataaaaagagttcctttagaagcctcgtggatttcaaaatggtgatttgcttgtaacaagtttattgaaaatgttatctgacttgtacgttaaagtgagattttaaatgattgatttaatgagaggcagaatattcagttaccgaagtaattggttggcaaagtgttagagcagaattatttagtcctagttataaaggattgcatctttaatcagggtgcttaatttgatttctcaaatgtatctgtgccttgccttacaggctcaataacaaatgagttctgttgtagggactgatcaaaatggagccaaccggtgtcactcaccattgtagttcattgcctgctgtggtcagctgtggtaatcaaatgctggcgggcctccgatgtctccagacctttgagtaattgacttcatacatgtggtgttgtggcataaaatagccatcacttcctgtttgatcttcagaaagtttgagtccatcatggagcagttgtccctttgtggtcatgcccatgcctacagctcttcagacagcgggtcacagctggggtggtggttccaattggacagcctttccgtttagtgttcctcctaaaaaggaagtaccagcagggcatcattttccctgcagaaacacgtctggtgtgaggagagggacatctggagacagctagttttttggttctagctgaggcattgctctggagggagggagaaggggtctcttctgtatgttgcctacggtctccttctccctggatgagtgtgggaagcccgtcagatttgtagcgatggctacaaatgcccttctttataacctgttttctgcctcttccttcgggaagaggaccaccatgagtgtccctcctacttttaataattcatgtaattcttcccgtgccttgatgtgttaggatgcacacgtgagtttacaggatcgtttacaatgctaagatctccttggttcagatgaggatctggaacttgggtggatttgggactcccttgcttggagtgatttattggtccaagctggtagaacattgaagctcagctttggaatgcccaggctgccggccatgctggtatgctgggcatgctggcccagacggagagggcagcagcatgcccagagggttctcctttactacggttctgtttgatttcaacccctccagccctccagccctccctcttccatcttttgtctttttttctgtttgttcttacatacacccggggtccccacacccacttaagggttttttggttttgttttgttttgttttggagtcagggtttctcttgagtacagctggctgtcttagaactagctctgtagaccaggctggccttgaactcacagagatctccttgcttcttcaggcattaaagctgtgctgggattaaaggtgcaagccactaacagccagctatatgcctttcctttacaacactagcccttcttctaaagggaacaaagtatcagaaacacagatttccgacaaagaaagatagtttgctagttttctgggcagcgaatggcttataaggttgaagtgaaggctcatacagatatcctctcactcacatgaattgtagaatttgcttttttactttttatcttaattggaactatttttttccaatacaaagaaataaaaattgtacatgttgatatagtaacatggtatattaacacatttacatggtaggacattacaatgagattaaaccctaagtagccttttgaatctctggtgtccggtttctctttgggttgatcacttgttaacctgcagagaactgctgtaaggaatacaagtgttagaatgtgagaccatactgattactccctctcccactgacttgctgccattcaacatccctttgcctcaatggtgatagtgttcctcacagactactcaggacatagaggtagtgccagtggagacaagccccgtgcacgcgccctaagctgagtgtcagcttcgtttcccataagctgccctgttgaaatgccatactttgtctcatccttcctcgtctagtctacatcttagatccttttgtctttcccgaaggctttctgcagtcctagggttatctacgaatagagcatagcttgtgctgtcattaaaagattgcatacaatacttttcttgagaaactgttgtttgaccacttaaaattggatggtcaggtttttaattttttcccccccttgctgttcaccagatgtaaaaatgtgcaatgagctggacctggagaattctgcagattgggaagtgaagacagtaacaagtgccttgaagcagtatctgaggtgagctgtcacaccaggcacccgcctgacagaagtggcaggagtcattttgacacttactgatacgagaagtctccaaagtatccaataatgttccagaaaatgagaccagcagtgtcttagtcactgttttgttgctgaagagacgccacagccaaggcaacttacaaaggaaggcatttaatcggggggcttgcttacagaatcacagaattagtccatggtcattatggtgagaagcacggtagcatgcaggcaggtatggcgctgcaacagtagctgagaactcacatctgatccataagttgtaggggcacacacacacgagggagagggagagagggggaggagagggagatggggggactagggcgtagtggagagagagagagagaaagggtctgagatggcattttgagagagagagagagagagagagagagagagagagagagagagagagagaaagggtctgagatggcgttttgagccctcagagtccaccatcagtgatatagcctctctaattagttctcacctattaatcctccccaaccagctctattcacgggggcccaaacgttcaaatatatgagcccgtggggctgttattcaaactaccacaagcaccactgttaagtaaactgcaacagaggagccttggatcttgaagtagatgcagaatatttccattatacactacgtagcaacagtaaggaaagctatttattaaatacattgaatctcttatttatgtattaaactaaagggaagactgttttaatttcactattttgaatagaaaagtatattataagacataaaagtacttgaaaagttttcttgttgaggtttttaagacattttcaggtgtgtttatcacagaaaagagcatagggctggaacgggaaagcgttgttgtttcctatctttggtaaaggagcttccgaatgaaagctacggtttgctgaagagcaacaaccgggtgcagcgatcacaactgcgcttctctgccgtggctctttgaggtttgatatttccatggcagaaagggtgacaggtggcatgactggccagtgcagggcaaatgtaggccacacaattgtagagtgattttccccgtgtaattacattggctcccatgagtgcgtgagaatccacattttactgtgtagtttttacaatgatgaagcctgtcctacagtgagaccccgaaaggggagcatggcgaccccttgtggcccgctgtgccgctcgggcacacatgccgccttcttcatttcagcctttgccctgccattttatttttgatactaaaaagagttttttgcagatatattactatactaatacacacttatatgaataatctatttaaaacagaaagacttgtaaaaaagagtaaccagaatgtatgtattctggccatcaacatcggtaccgtgttcctcagcctgtgttcacagggtttagatgatattgataattcctgtacttgctggtctttgagtctgatttaaggcatacagtcctccctgccccctgcaagcggtgcttcttggtgactgttttttaaatagagagctgtacattttctgtggtcttttttaccctcatggtgttatagagcatggctttttatttcctgaaaaatggttacacctatagcctttgttagggtcagatcaagtcatatttaatcaacttatttaagtagcccgtcacagtggtgccacttccttcctgttgtctcatgttgccttgtcaccactgctgcttgtattctgagacttaactaaaatttgacattgggttcaggtattctttaccagcttttgagcattttatttaaataaatttctcattcctaaactattgtgtacattattgttacccttaattatttcagcagcaaaaataaagctaaacatatatttgcagttctagcttgccctgagtcgtgactgtggtttggaggagggttggaatggctgagctctgtgcggtttggatgtaagttccctggagagataggtgtcgtgtgagtgctgctcactgtggtgtcccctcctgtccctgaagaatgctggcagtgtttgcactagaggtggttggccatctccaggatacttgatgatatcagcatactttcatttatttatcttaattttgtgtgtctggatgttttacctcatggatgcctgtgtgccctgtgtgtgcactgtctgtggatgccgggggaaggtatctgttccctttggaaccggagttacaaaggattcttacctgttgtgtgggtcctgggaaaggattctgggtcttctggaagagcagttagtaatcttgacttctaaggcgtctctgcagcccctgtgtacattttttaataatcacagacagtggaggtagtcttacatctgtaggtaggggttggaagggagctgttaatccctccttctttctgtaaggaattatttgatcctatatataatataggcgttcttcagtagtgctgcagttgagaatgcctctgtaggatgagcagaggaaagagtgggtgggataagaatagaatggctggtatattcctctctggcagctggccttggatccatcaagcaataccttgatacgttatacctagtgcactaacgaaactgtccaaatgacagttattgatggaaaactcgagagtaaacagtgacctcttgagagtaagttgtgcttccgctctcacctctcagggctctttgcttttcccttggtgggagttaacttggtaaaatcggggcttcgtattcacatgcgcacgttgtgtttgaacctcgagagtccctggagctggttccttactgatgctggcctggttgcattattttccccttctctcggtatatcactttatcccactgaatttcactttaaatcagccactgcatacaggaaatcattatgcaacaccgttattgtataacttgatcatacatccaagcattctgcctgtgttgagcgattttcctaacatgtcagaaaaaagtgttatgagcttgggagagataggtggcagcctttcctcctgggctctgcttagcaactgtaagtgcatcagttacgatttaggtgatattcttttctgattgatggttcctcccctcccctcctctatgtttcttatggaattgtggccaaagccagtagccttttctggcctgaaaggcattgctatgtatgtgatagggtaaggatgtgaggtccagagccagcagctagccagggtcagcgtcccagctctgtcactcacaacaccagaacatagctatgaaccaccccatttctctcctctcagcctttggcctgtgatgctccctgcacttgccagcttctatgggatgcgggcgaagctagaggtggaggagggagggatgcggctgagggacccagcagaagcagaagcagcaaagcaagcagcctggctgtgtcacagaacacaacagaaccagtgagcattgaagtgtcctcctcacagtccctcccttggtctcctgctgacccaggctgtgagagaggcctggctcccagcctctgcctaggcagtctgtggttttcatgaccagagatgtgttccttgtcacagtttcccattctcgggcaaaactgagcagtttgtgaggtttctagtgaagtgatttttatctggaggttgcttcttttaagtgtggaagacgggatgggttcatagggaagaaaataccagcttgggtaaatattacgatttgcatcctccaacagatctgatgggtggcccagtgggaggctgggagatgctgcgactcagtgtaataaggtttgcgtggagaacttgtaattgtttctaattactgcttccctaacattaatggtatttgtttttaaagttctattgccacctagacatgtggcagggatgtaagtagaagacactgagacacacgttcagttttattgaagaggaaatacccttctcagtgctgctacagtgttcggttttcccttttctttctacttagctcccagacttttcttctgtgaaaatggatgctttcccttcctctgctatttctgctccctggcctgtgcttggaaacacaacccctgaaaactgtcctaatggctgtgatgtcactggcacatttgtttttagttaggaataagggaaaggaggtggggtggggggagaggggctgagacagctagttctctgggttgtagctattgggagggacactttgtatccctgtgtatgctgggaccaagctgtgtgcaggaaacatgtatacaaacattttttatatagctttttttaaaaatagattttcttcatgaatctcaatgcatattttatccttttactaatacaaacattgaggtagtgtataccttttatagcttttatgaagtataattgattcgaagtgagctgcaccattggtagtatagatttgtcatgggcttggtgtctttattctcccatgaaagcagcactgtaatcagtactgagcctgtccatccccttctaaatttcccgtgcttctttggtgttccttccttcatcaatggccgcatccatagggaacctctatctgctctccgtctttataagtggaactgttccgtggctacttcaaaaacttattttgacttagaatacttagaataatcattgtagcaagttgaaatccattaatctattgatgtgtatttgggtggtctgtacctcttggctgctgtacacaaaactgcttaaatggctctgtgtaaatctttgagacaaagatttttcctctcttttgggtgaatcctagtgggccacgtgggaggcatatgcttagctgtttggaaagcgatcggctttgtgacccaccaacagtatccatgagtcctgctcctctgcgacctctgaatgaagtcacctttcttacgttagtcgctcttgtaaatgtgtgctggtaccttgttctttcagtgtgagtgccctcagtgtctaaaagtttcctggtgtatgagtggttcgtcatacttgtacattcgttcctaggtgaaatgtctgcctgtgtctttccttatttaagaaaaaagattacgctttgtgaagttcttcatacatcttagaaataagtcccctttcatatgtttcagtgtcagtctccctgcctgcgcacacacacacattcacgctgaccagagtgactttaggcgtcactgcattatgttttgagacaggctgttccatgaacgtagagcttattgatcatttggtcagcacttggtagaaggatcctcatgcctctgtctcacaaactggatgatatctgctcagcactcactgcattccgctttggatatggctgttcgcgtcccaaacactttacccactgaaacagctcctctgcctctccactcttattgaaatcaaagaatgtactgcctttgacttgaacatttttaaattgagagacatgtgtttcatagcccagaatatggtttctcttagagactcaattttccatttacagtgtctgtaatatagtctgtgtttgggcagatggtcacttaagaaaaggacatgtacttgggtgagggaggtggggagttttgctcaaacattgtttcttggccagtttcttttctacttgtccagtcagcgatggggacagagagattcaaatctggacctgcagtcgtgggtttgcctgctccgtgcagtcttgttagattctactcatgtatttcaggctctgttgcttgttctgagtgagcattgggtttggtttgttctcagtgaggcaaccccctttcagcacggagcaactgtccttatccctggcattatttggggtgtgtgtgtgtgtgtttatgcatgcatgcttgtatgtttgactgtgttttaaacatttcaagatgaattctgagccccaggtttatagcctttcaaatgctcacagtcccctgcccgagcagttctgtagattgacacttgttctctgggagctatgcagttaacatccccggcctggcaaagatatattaacatattagcaggattgatgagagctcagcatcatgctactgtttgcataatgcagtttgcagaaaactaaaatgctgtgtgtgttactaacacggccaccgttctgattctgtctcactatttcatagccacagactacaaagtcatcttttattattatcattattattattaatgtttcctctttatcagtgattctcaaccttcctaatgctacagccccttaatacagttcctcatgttgtggtgaccctcagccataaacttattgcattgctactttataactataattttgctgtggttatgaatcataatgtaactacatgatatccagccccaaaggggttggggaccactggtctgtatgtatgtatttaggtatgaaaattaaaaagttattttaatagaaatatcaagagagactttgtttttgtttctttaatacttcctgtgtattcttttgatatcaatattttaaagatgcctttcaaaactatgcctgtattgcttaactcatatgcaaagctaggtgttcataaagatactttccaagattagatatgcaacctgatgtgcatcgacctggtaagaatttgtggttggttaagagttaactgcgtctagggggaatagcagttagtagagcagtcattgtggttacgtcttttggtatgtaaagctatctggcagggagagctggcatgttagctcagaagtgcacaggaggttcagtacactgtgaataaacttagagctgatgtctggctttgtttggtaattaggctgtgtttttttttttttcttttttttttccaggagtcttccagagcctctcatgacctatgagttacacagagacttcattgttccagccagtaagtattctgtgggtgtgcaaagactcaggtttgtggttgatggcgtgcacgcgttaaatattcccacatgaaaacttaatggttttgccatctgtgttaaagggagagatcattttagaattcacttcctccttatgaaagtgaggaaaaagattggctaacagatcaaccatggacctcagtgcatacctgttgcttcttcgcccccgtatatgtcaggccacaacagatggttggctctgaactggttctgtccacatcacactctccttacactacagatacatagtactggcttgagctcactgctgcagaacaggccagcgttcggcttacaggaggttggagagatggtgggcttggagatgttgtagtctggagatggtttcacacgcagacacttatatggacattacagacaggattaggagataatgccagaagcccagactacctgataatgagttatataggatgcagtttggaatgaaatgaagccggtagctggtgaactttaacttgaggttgggtgttttctgactcgtacccactggagtgtgtgtttgtgccagcactgtgtgcctgcagtgtgaggggagagtcgcctgctgcagacagactgggtgtgttctctctcatgcagctctgcttttatccctagtgcatgctgcttaatcgttcttttgagggatactcacgctaggtaattaagaggtaggacatcgaggctgagacatattaagtaactgccagattatacagacccttgtggaaaattagaactcaactccactggctagattttgcaatattggttttcacaggtgccccaacagtgggtgaaattgtacctccacacaccgtggatatttttcatagattatgcactggcaatagctgaaattgcacccccacccccggatctgttttatatagttaaactgttgaaaaacttacagcaatcccaatgggtcctatatcactgttgcttgaacatggctctgactgttaccttcttgtgaggtcccagctccagactgtgtgagattcctaatctgtttcagaaagaatcagtgtgttgaccacattacactacacacagaaagaaaggccagaatacagttgtgttcaaaattattccaaaaaagagaacttccacgagcaaggacgtggaaggatttctggcaagaacacaagcaaatgcttagttgttttgatttcttccctgtggcatttttggcaaacaaaagatagaaattaaatttagttggaagacagtttcaggctgtttgtcttagagcttggaaaaagccaggctgtgccaggttgcatccagaattctttgcattctggagaaagagtgatgatggaatgaggttttaaatccccacaagtcagtgtcatgagaattattaccatgtgtgactaacagtggagtgttctgaatcctgatgtcaaatgtcttttaccagaggaggaagttcctacacatcaggaggtaatgaagcccgaaatgtgggctttgctggtctatttagctgtgttgctaattatcagtagatgccatagactctgtcacctgctgggtcagaactcagtgtttttctcctgaccttgtgatcttgctgtaatagtttgcatactgatttgaattacacttctactgtaaaggaatactgtacttcccatagttgcccgcatggacttgtacctaagtacgcttgaagttggaagagcccacactaatctgctttaatgaaagaaaccacatgtgtttaatgggtttgattacttaggggtccagtgtgtcagggcagtttgatgtctcattttcctttcttatgagtcccttcctctgtactccgtgcctcttgggaaagagcttgcttgggagtggttcctgtgagattgcatatgtccttgtaagtattgagtgcagttacagaattcagatgggtctcattcaaaatgagccccttttgagtgttggtaagttgggattgtggttaaactgttgttttcccctggacacatcacagctctcctggctttgctctgtgttggtgagctcagttgacagctaaagtgaccccacgctgccagcctttgttgctgccccgggtgtgattctccactgtgttttgtttccctctcttctgtggtgtgagagtcctccttctctcctgacaggaggcttctggcctcagtcattttctctcattgctttattttctatcatcttctgtcaagtacgtgagtttataatacaaagataagaatttggttttatattttcactacaaagtatgtatctttttttttcttattgtaaaagaaaaactgagctgttagtatgggaacatgtgggaggcatttttcaatttcagaattgaaagccttaaactattaaccacatttatttggtttactaaatgaacctatccatgagaaactaccctatacttttgggggtagaagcatacaagccacaaataccttgaattagtttgtgcaagaattgaaaggattgtgtcacttgtgcaaagccggtagcatctacctggaagccttcctctgtgaagcctattgcctttcagcttacgaggtagttcattctctgtagcctacagtctctacagtaactgtagagtctcagcggtgagcatggacccgtctttctgggttggactcacattggacttagcatgagataggcaccttaatcctggtgcctggcgctgggtacttagaaacctctcccagcagttactcagacgagaatacttgtatttctgggttgtgcctgtgccttctgtggtcaggttgcttatgcagcaccacgtcatttctgaggagagacaactaactaacttaggagtcagggcatgaaatttgcataaccagagccttccatccccttctggttgggacatacacaaggaaggatatgtgggcattacaggggttgaacatgcagtgtctcctgtttcccatagctgggtgtgttcactttacagtaggtgaggaccacaggaaaaccgtagtaccttttgcatggtgactgagactggtgtctcccaaaggaaccactccttcgtaacctccttacattaccattgtattgacatatatcacttaaatattaaaataatttaacatcctctgcccgtgtgtttctgttaagctctagtaaacttgcttataccccagcctctgttgttataaataaatagatacagaggtgtggtgatgctgacgtgtcgtttcccaattggtttatttctctatcacagcaaactctctaataaagtctctggcacataacaggaatttagtgtatggttaattaagtaccatagctaaaaatgatgcattttaatcttttttagctgatatcaatgaaaatactgcaagatgcatatggtgtgagtgatggggaaaatgtaatttagcaaaattttggaggtagaaggactatgttacattatggaagtgcctgttaatggaaggatgtaatgtcaaaacagtataagttgaaaagctaaaaaagcagacacaggaaaagacaggtatgtgcatgaggcacacacacacacacacacacgaaggcagacacacagacacacacacacacacacgcacccacacacacacacacacacagagctctgagagagatactgatctgatgaactgtcgtaggctcctgggaagaggcgcttgagacgtgaaggggaaatctctcttttttctcaaatagctttaaaatgttgttcgtggttagacatgaagaataccatcactagagggcaggaaacttatctctggcttatatttctaagtgttgaatcccaaaataacaaactcgaatttcattgtaggaggctgcttattagtgccacggtaggctccaaagctagcgttcttccatcacaaagcctccagagttctaaacctttgataataaaattgctgtctctgacagtcttcattttggtggagcctatgactacttcttcagagtttctgcttttattttgttattcaaaaatcaagctgggtagtggtggcacacgcctttaatcccagcacttgggaggcagagacaggtggatttctgagtttgaggccagcctgggctacggagtgagttccaggacagccagggctacaaagagaaaccctgcctcgaaaaaacaacaacaacaacaacaacaacaacaacaacagaaaatgaaacaaagctaaaaagaaagcattggcttgagaatatgttcttcttactaataaatttcttcaacattatgcagtcatcttagttgacatctgtaggtttttatataaagcttctgtagtcagcagtccttttgcttctgctattttgatgtttgatatccgaggccttctgtggcctgcagggctagcaagttcttaggtacacgttctggtcccgcttcacattctgataaccagtgcaaagccgtatgttctccctggctggcattctcattgttggcccatattataggacagctcacttgtctcagctccctcagaagtgagagtaccagtgccagcccttcttgccccgtgaatctggaccctcccagcaccattctgtagggacccctgcctctgcccctccttctctttatgccccgcctcaccctggcacttccttgcagagtcctatgtggtttgtgtgccatctcttggttaggtattgtaaaacgcacactttttcttctgtcggcatgcgttgtcatacatcatcaaaataaggcatgagctcagtttagaactgccccttcctgaggcacctaagtgatgtaacctgagcctcaattctgggggagattcacttgagcctgtagctagaaggattgatattggacttgtgtttcctggtggattgccaaagactggcgagtgccatgtgagctacaagcttactagaaaaggtgtttttcagggggctggctactggagttgcctgtgctgctaacaccaacctgggaaaggcaggcctcatgcatgcatgaagctgtgtgagaggtacctgaaaagtagagggacgaagatactttaattttctccaaaagttgcccacaatgattaaattcattatttttttcagctcctaaacaaactgttatcaatcgtctttaagggcagtctgtttgattctgagtaccctattgaccactttctcttttccttcttaaaaaaaaagagagcggcagcccggaatcccgagttaatgccatccacttcttggtacacaaactgccagagaagaataaggagatgttggatatcttggtgaagcatctaaccaagtgagtgttccttccccatcagctctccctcatcagtgctgctgttgttcttggctggaccgtgtatccccaagggtggtgaagtagaatgccctttgatgctatgtaagcggcttacacctctgccagcagctcggtgacaggagagggcactgtttatgttttgtcctaacagattgtgggaatagaactgtgagtctgttagcaaattggacttggtaccaaacacatctaatgctgagactgaatgtgccctttaggtttgttgaatctcatggtggctgcatccatgcattacagccctgtatgtacaaaacaactcccaaatcactgtatcggtacaatttgaatgaagaacagtgtttggaacctgtgttttctctaaatacaaccaagtgccttttgaaagtgccagtggacacatagttggacaagatgaatggtggctctactctgtgaagcttatggagaaaagaaacaggttatagcaaatgttaaaacgatttcaactagggagcagacaaggtgtgttaagacgatagagagcctgtgttgggctgtgatggccatctcttgtagcgggaagtcctgagctgagtgaagggctgatgggcactcctgtctgctgtgctcctggagctgcaggattgcaaggagagagagagggtgttcgaaggaacggatctaagtgtttaaagctgcgtggagtctagccgtctgtggtagcaaggggatggccagctgagggaagatagggtgttcttggctgcttttttctatgtgcgtgtgatttgtggagggatacacacttgttgaaacgacaagcaatatgacttatgcttgtgaaacggactatgattaatttaggagattccgttttcatttccaatcattggctccagacagctgcacaattctttatatctacataattccacttgtctgtttaatattgatcaaatacatgtaggaaatgatgacagggactgttgaaagaaaggctgcttgaaaatgagctaactagcatgaggtctctccttagcgggaacaacttggcagaattgtccttcagtctggcaaggtccgcagtgatgttagccttccattcctgtgacacacatctgagagagctcactgtcttggggacttccctgtgagggcagctgatctgttgctcaggcatgaagtgaatcagaataccagcatggaaggagcctgtacctgaggagactggttacagaaggagaaggaagactggagagcagggaaggggacagtggggagcgggaggggacaaaccagcttgtgtgtgctggctgctgtttggttcaggggtcacaggcagacactgaagactgttcgtttcttctgttttttcgtacgttattgttaaggaaaatgcagattattgaatgctctattattatcgccacccaactaagactttttttttctttctaaatcaatattagcgtgtcaagtcactcgaagcagaatctaatgacagtggcgaatttaggggtggtgtttggaccaactctgatgagaccacaggaagagactgttgccgccatcatggatttgaagtttcagaatatcgttgtagaaatcttaattgaaaaccatgaaaaggtaccattgtcctttcttccttaatagtatttgtgaatgtggctcgttaacttattacacagctttgttatttgtctgtattgctgtctcgtcatcgctgtgaatttattccccagaagttgacattcagttgtcttctgacggagttctgtgcatgagtcttatccggtctcctcctcgcttcactgaggaagctttgcctccagatgcgatgagtacacagtgcaggagtgattgagcacagtctaacttaatagctaattgagcactttcattcttagccttggatttcctcagttttatgtgttagttgcatgtcttatccccttggtcaagagagggctttttagctcagagaaataaaaaagcaaatggaagtaacacggaccggggacctgctggtcacccttctgtggtgataaaatacctgggaagttaacttagaaggaccaggggcttattttggttcatgacttcagtggtttctaggaagcacgattagtgtttggggccctgccaaagcatggtaaatcatggtgatgctgtgtgggagtggaggctggaaagaaagagacaggaaggcacatttctatgtcacgaggattcactctcatgggccagcattgctggcctagaaggctgcatcccctttgcctccggttagagcggcagggcttcagtctggagcatgggcaaagattggcttcaggttttagaggatcttgcacccagcttcagacctgagtgtggctgtgtctggtgtgtagtctgccccatgatggtgcgtgttgggaatgcggccgactggttggggtccctcagggcagtgtgtgtgagagggtgggtttgtgcccagtgcccattgctcagcacttacattcctcaggactaagtttcttcctgttaagaaaagcaaagacgggtgctcaggattgagcaaggcaaacttttacccttaacgacacattaacagtctaaccaaaaagcaactttggttggggcaaagtttttattagcctttttggacctctcctagttaaaagtttataattctgcccctcttcttgtcctaagaatttcagcttgttacctgtactgccaaatctgggcactaggggaagaatttctggattaaagtcttctcttaggtgactgttgtgttgttcagtactctgcaacccaggcaaaatgtgtcttttaaaaatagagtctttcaaggagtcctagatggccccacttctgtcaggtatagtccgtggccttgctagctccctgtggctgcctgtaatgcagggaatgtgaggaccggaaagatacatggtcattcatatgtgtgctaaaaacgatgtaaagattgtaatacatgctaagcctgtagcaggtcctgggacgaagcagagatactggcaggcctggttgggaagtaggtgacaaccatgtccggggctgactcctgcaactcttacccggcctgctgcacttgtagcgtgttttcttaggtgttgactgtttctgctggaccattgagcacagtggtacgtaatgtatgtctatgctttccatccacagggagtgactgctgatggattaatgcatctggctcacccgttgggccgtggggcagtgggaaagacacagcagacagacattcccttagagccagctgtgagcacagctcttcctgggtccttgtactggctacttgttggagcagtttggccacacataaatttacatttattctgacaagttaaacctcatacccgatctgtcaattatactgataaggtaaagacagtttgtttgaggcagtgagtcttacttttttggtagcatctgggggtgaacttatgccttcatttatggtcctgccacacttccattgagcctcagcatgtactgagtcaccagggaagatggctactgttcacattcagaaaaatacatcattagactaccatctcctgaatgtgacagtagcttaactattttatattcagtcttaattaggggaactcgagtgcagttcatccatgagaactgggcttagggtcttgctcttgggtaagagggactccaagccctgcttccagggaaatgaccacgtggtgtttttacaggaaaatggtgatggcttcctgagttgatcggttcatagagatttctgaatagccctggtgagccagtccttgtgtccaggcagaagagggcagccgtgcactccactcttagaggtgcattgttttagagccaagtttgtggtttttctctgcccttctgtggctggacacagcctaactagatgaaaagtgctgagatttcttgtgtgtgtgtttagttgaaacagttacatcactttcccagctctctttctttctccagcctctgccagctccccttccagtgtcatctggccatacagataggatctgtgatggaggcgtatctcttgtggcttggctctctatgatcccttggtcccttccttgtgtccagttgtcgcgttctgtgacagtctccatatgctgtaaagagagggcttctttggtgagggtttggtcatcacacttatccagaaaggtggagagaggaggtgggctggctctgtatgcaaggcttgaggctgaggtgtggaataatatgactgagctgaggggcagcttgctttcatttgcagttccttacttcctggcttcctccgacttcccttgtgtatttcaaagttcgtattttttatttttattttttttcctgagaagttaacagggctgcgtggcctacatggggcctgctttaaggaagaataaatctgctgacaaaggtgtttgtgagtggatgtttgtgtccatattagccacatgcctccattggactggaaagtagtgagggacagagggatttttttttttttttgatagacatttcagaataagaagcaaagaggagagcgaggccaggaggggttaaaaggtttgtgagggaggaaagcaccgtcagtgcccagcctaaggggagtgtgcaagagctccgtgagtgagtgaggacagtgcctgcccgtgagtacagagcactggacaggaggcgtggctgtgattgaagggctgccttattctcttggtgcttattttccttccccaagggaatgtgagtgcaggagcatccccaaagcagagagcaagcccttctattgaagcagaagctctccagctgcacctcggagtgaggaggagacgaagttcctctgcgtcggaggccatgatttccctgccctttgctgctgctgcttataaaatccatatgtacttgctaggaaactcgctccatatgtcttgctttcttttgcacactaaacattaagatgttgtttttaaacagaatattcctgggccaaaagcattatcagggtggtgtgtgttattttcctttttttgcaagacagaaaattgtttttccattgtagaatgggtactctgtacctcccacagatttttccagctgcggttatatctgtggctttgtgacttttatgtacttattatacattaattcagagcactgtttgccgagtgcctgttgtgagttagctgtatgtgattgggggaaactaaacatgagagttctgttatgggaaaggaaaactcgagataagatacagtgtgggaaatggagagcatgccaagggctccatgggaagactgtgtccgctttggtgtgtgtgtacgcgcatgcatgtgcgtgcatgcatgcgtgtgctcactgcgggctatctctgagaagctagtttggatgccctgtagagtggaggtgtgcagaacatatcctagggtaggagacggttacccagagaagatggcactaagaaatgtgagatgaggttagaaagggagtctggctgggtgtggacagggtgtgcgtgacactagtggctctcaggacagcacagggtttcaggtaaacttgcttcaggcagcttaattgactagggtgtgcaacagcatgtagaggcatacattctcaggagggagggctccagtagagtaagggcatggtcaagaagacagggcgttccagggtgaaaagccttacccagcagaacctcctgtctaatctatatggctctcattggaccgtgggggaactcagttctgagagatctgagggaaatttacaaatagacagaatagtccccggcatgagatcagcttttagttcattaaaatgcagaatttgtgtcttctgacagtaatgtgattggaggtctttgtgtctacagacatttaaaatacatgctaaaaccatgaagctgggcattgttgtgcctgtctataggacaaagactgaagcagatggacattaagttccaggccaccctgctgagggagtttgaaaagactagtttggtgatagaatatttattcacctagcacagtctcttgtgtactgcactcctcctaaacaaggacataaccaacaaacagcccaactgtgtatgtattcaggaacacgtggtcacatgccttcagtgtatgtgataatatctacctaggtacagaattcgtatgcatactgcccagtgatagatgaacttgttcatggggacacagccagatggcagtgtttgggcttggactgagagtgtttgatgccggatgctttgttttgtgttgttggaatacaaacactgtcctagagaaaatgtcaagacttagcagcagtgataaaagaggagtcataagagatcccgtgcttgtgtaagagttgcctaagagtgtgattaggcatgccagtggctgcctgtgacaggagacgtgggaaagggcaagtggcatggggtcctgcaggagtaaggttccttcccgttgggagtaagggtgagaggcaacccttgaggatctgggagtgtgcaggataggagtgtcatgagtcctctgggaggagggacccagaagggcctgcagtacctgagggctgagcagctagctggtgcttcttgtccttgtgggtgtaaggagcccgttagagagacagcagagtcggtgtaacgttctcaggcatttgtctgtgtacattgaacccatagttatgcactaaggtctacagcatgactgtccatccaaaggcccatgaaaatcctaaagaactctgagaccatcaaagaacacattaatgttaggctgcctttcttgggatctctaatttcacattaatgctgcaaagaatggtgccatataacataagagtcgagcgcctctccacctaatcattttagatgattaggactataatccagttgaatgtcttattttgacttctcggtgtgatggaatggtttgggttgacctgagcctcacgtgatatttcagtttgctcaagtatttcattgattctcgtggagacaggaggtcatcgagtttgtcttaggaccgacctttataccttgtagtctctttagaccccagggcacacagagactataaaacgttgctcgcataaaactttttgttgatggagattttcttgatagcttttccaaagaaatcatgttagcatttggaatgaggagccttatgctactaatttgttttggttttggtcagcttgatccaaacctagactacccctgggaggaaggacttacagctgaggaactgtctccatcaggctggccagcaggttcctgggtggtttccgagtcaagcctctgcttgtagccttccttggcttcccccaatgatgggttgtaacctgtgagccaaataaaacctttccttccgagttggtttggttttggttttggtcagtttggtcacagcaacagaaagcaagctaggatagttacatttttcttggttagaaatagagatcatctgtgatgatcatgctctgtgcagaatgtcaatttctgtttcctttctggaagtttctttcctatgctctgttttttgtttatttgttttgttttctggttggaaatatataagtctcctgtcagccagcaccctgcccccaatcataaagaacaaaggaggacaactggaaaggatgctaggagtcagccaatgggaaggattctaggagtcagccaatgggaaggatgctaggagttaggcaatggggaggatgctaagagtcagccaatggggggatgctaggagtcagccaatgggaagagtgctaggggtcggccaatgggaaggatgctaggaatcagtcagccaaccactgatggaaagtaccatggggagggaggggaatacattctcgaagcatgcagtctcttctccttgccattatgacccaaatgataccaagtaacaaccttttaggtagcatttgcattgatcaggtatacgggtattctagcggtgactcagggaggcggtgctcacattggatatcagtactgtggtgttttactcagagtgcttgcacattctcacaattaatatctgtggagctttgcatactgcagatgacagtttcccagcagccatcagtgcaatgttaaactgtggacacgtacagaatactctccagatgtcccccttgtgtctctggtgctggctgttccatgctttgggtttacattcagacatgacttttaaaaaggctctcacagcgcaggaaactttccttttcaggtgagaggggaaacagtgatgacaggattcccaagtttgcactgggtagccgagagccagggcccagagaaaggctcctgagggtgtctgctcccagggaccaccgtggtagtttgagaagagaagatctgggggcagggagcattctgaagtatgtgggtacctagcatacccacatagagaaggagccagagggtgggagggctgcgataagggagggtgggttctctgcgggctgagaaagcgctctaagtacaagggaggcggacgaatttgccaggagtgagcttttgattgagcaaaggaaggccaggtgttggagctgagtacggagcagggctgaggtaaagattgctgacctcggaggtctcgcccaccctgacattctctgcagaagtatctggagtttcggagatgcagagatctgtcctctgaaaagtgagggtgtggaacctgatcctgctcaactctttcagggcgtttgtattcccagcacgtggcggggagtcgggtgctgtgtggagtgggtgtgggcaggctggagagtagacactgccaggccctttctaatagggggaggttagcgcaggggtgtatgggctagacgtctgcctctggaaccagtgctctgttcctctgtaaaacaaagctgcgaagtcttcagaggtttctcttcagcaccgcccaagacaggattgggaataataatttcaaaacctaagtggtaaatgatccggtgccaggcctagcttggctcctcttctgaaatttctctgaagtagtttatagaccgtttgtcatcaggagtgctgaaagtcagtcccttgtgtggggctctgcttccccgcttgtggggtgtttcctgggatctcttcagcctcgctgccagcgccctcacctgtcagacaaaacccaaaggccgtctgtccgtccgtgagtaaccaggacagggctagctaacacctgcacctcacgctgaaaacaaagtgcacagtcaggctgcattcaaaagtagaaagtggctgagccaacatttgaacctggtttttgttctttaaagcctgttccttaactgataaatatgtttgaacagtcacattttaaataaaatgactatattaatttgtgtcatttttgagaaaaacaagaggtcaggtggttttcagaacaagtgggtcaggcagggaaggtgccccttgctgctgcctcttctgcctcacttctctttccctgcccacctcaagtgtgctggatgctcctcacccgggacgaagctccgccctggttttcaccgcctgcctcacgtccatatcattgacttggctgtggaaatggcagctcccggcctttcctaagtgcacccctctgttaggtatctgatgtcaccgtctcagctactgttgtgcgcagcagctccaaggtagatattaggttgtctgtacctcacattggagattggattaagagtttgctgaaggtcatgtagttgtgggaattgctaggaatccaacctaaggcagtgtatgtagtcttgcagtgactctctggaaggctcaattgtttagtgggttggattatcatcctaagttgatcttaaataacagatttgaaatagttttggatcacacttaatcacctgtatgatgcctgaaaatatgttcagaaatctcaagttacaataaacattctaagtagaacaagataaacatgaaatactactgcagtaaaatgtaatgaaatgagtttttaaatttttgagctataagctagtcttgaaaataaattacacagttttcatgaaaaaaatttggaatagtaaaagggtacatgaacagctctttctcagagtgcttaggaccagagcgttttaggtttcagaccttgtaatttcctggatattgaaatactttcataggctttaccagttctctaactaacctaatctaatctaaagtacaaataaagaaatgcttcaaattagaaagtttgagtgtcatgtaggtgtgtgtgtgtgtgtgtgtgtgtgtgtgtgtgtgtgtgagaaagagagagagagaatttattatattcaaattttctgtttggggatgctcacaggacaagtataccactgaagttctcagacatattctccatcagagtaggacttgtgcagaggaaaatgccctcatatattccaaagggtccctgctacctctgcatagccaaaacttggagaaaatttagaactcagagtcacttccttttcatttatttatttatttgcatctgggtcctcctacttctgcagtgacttacagtactttgattcttatatttcactgcccaaaccctcggagacctgctcacaatggacacgagcttcgccatcactgtatgcaagttttggtttgctcttttctagctctgctagtcaccactggactacacatggtatctttcagtcagtgggctctgggcagagtcctagtttttcctcttaccaacttggaatcaggctataaagaaactaggcttgttagtgtgacgttgctcttgggtacccagcctgaagggtcctccgtggtagatctcagatggaggcagaatgggaaggccagggagacggggtgtcctctgactaggggtgcaaaggctgtcagtgaaaagctctttccttgactcttgatgcccttcaggtcctaatcaaggcaatcttaagttcctgttgattcttcttactaaaatcagtttttttcacctctttgatttgccagggttttcattacacatagtcatctgtcagattgtggagagagtatgagacacctacaatttagttcatttctcataatcaggctcttttaatgattttgattaagctcagcagtatttatatggtgctatagctttgagtatctcctatgtgacatcaagagtatggtcacacagctttaagtggaaactggtcctttggagcattccaaacctagacctcttccgaacctgaccctgagcccatgattttatacctggaacctgggcgcgctgtctgtctttcaggtcttgtctttttaaccagcctaacctgttacagatggattgcctcaagcttttctcttcagttcttatcttctcagtccaaggttgaagcagcaccatttacctcatctcccttcccctctccctgcctatcctccctgcccttccctgtcaaagtaacttattctcctcttgtaattgtctccgaggtttgctgcctgtctctgcagacctaggcctagtctggaagcttctagcatgggtacagtctaatctaggcctagaatgttttcagcctctgagacttactgcagaatatgctcaccctttctagttctttctgagctctgggtagctggttcaactcagctgtgctggttcaaactcgtctccaggcttattgattcaatctggcttttctctcagcctctgactgaattgctctgcttgacctcatactaactctagctttcttttctaatctgctcactttgtctttaccggtgtctagcttgttctctcttcagtctgtctctgtaaaactctcccggtgaaactgcctccttctctctctctctccgcgctgctccactctccttcccaactctactgcactgctctccatggactccactgtattcctggactgtactcccttctcctgtactggcagtctctcccttaagtagcttccctttctcttctcataagagttgggcatatccttttctgtcaaatctttctctgactcatcactttgtctgacactcaactagacatcgctttcaaacatgggttctttcttctacagactttaccttcattgtttggaattacaggtgagtactaagggctggcctgtattccagccagagggattaaaggtgtgtgctaaggattgagccacaccctaaactagaaacaggctcaaatactctgtaacactcctgcctcccccaccccaccccaccacttttctggtacttccccagctcttgaataatctctttcttttatggggatggtttcccaggatgttgatctctgctctgaaggcctgtgctgtcccatggtattctgcacctggctggccttctggtctggccttcatctggccactgaacatgaaaagtccatttctacacctgacatcctttcacctgtcttcctgaagctttattagctcagtggtgactctgaaaatgtcatgaaagctttgggttctattttcagaaaattgcctgcgtacattcagggattgtgtatattatttcaagagtcttaggaaatctcaggatggcaacctaggcctgtgaggaaactgggaacctaaaaatctatgagtggtatcagggttcatggaagtttttgtcaacgctgccttttttgtcttctgctcttatttatcattctctggaacctgacaggagggatagggaagccactcgtctgatccctgtctttctcatcaggaacaccagcctcaggaaatctctcattgcagtaataaaccctcagattagccacagaaggtaaaagcccagaggtcattttcggtttcaaatgaatgggtagggtaatgaagaaatgctggctctgtcttttggagacactgtggtacccagccttctggggataaggggaagcagtagcaatggccttgggcagatgaaaagttcgccttggaagagctagacagacagtccagtggttaagagcactggctgcttcccagaggacctgcgttcaatcccaggatgcacctggtggctcacagccattcttaaccatgtttcttgaggatcagatgccactttctggcctttattagcaacatgcactcatatggtgcacagatatacacgtggacaaaacatacagacacacaaaaaatgtaaaattaaaaggtcaccctggtctcattagattttgtccgtctaagttcatggtgtcatttgaaaccttgtggattttctttccagtgttgcgtttaatctggaacaactgagagctcagcgtatgttattatcttagcttataacatccatttttaaaaataatttctaagtgttggcaattgaatcctcatgcctactatgtacacattgtcaccgaaccacaccctaatagtgtttgcaatggcaaacactactgccctcagtcaaagctaaatgttttgactagtacattcttgccagacggtggctaccctaagatagatggtctttgctcatgcactttaggggaccatgccagcctgggtctcctagacatcttttaatcttgcaggttctgtttcactaaaagtcagagtgagcacgattgctgtgtgaagcaggcggcctgccttagtcaggcgccttcccagtaaagcctggtgccctgcttgctcaccatatcaaggtctcaaagaaagatcacactcttgtgatacttgctggaagtactcagaggtgcagttgccctcccagatgagtatcttagggcacacaagccatgggcttaggtgatacagctctgaggaagccattctcaggctttcttatgctgtctcttccccacaggggtcacagggcacagtggtgaaagtgcagcagtggatgccatgttccccaaataaatgccagacccaggactgtgttcataggttgctagtgggcatctggcatggcatgtaccaaacttcagagtcctagaaggccttaaagtagcatctgaatcgttttaggcaagcagcatgaacacggtgggccaccccgacaccacctaggggatgttttaggtcagtttaaaaatggctcaccagccagcagagtcgggccttacccacctctttttccttcaaactggatgtccgctaacggctacagcaggaacctctgtggcagggctgaggatgaggtcctgttccttcatctcggatgctgtcatcatcctctctggtaggtgaagtgtatgtcagttcccatcgtagagatcccgaggcggagagccggtccccccagattccgttgctgcacattgtgtgggagctctgaattgcgctcggtaggcattcgtaagcatgccaggaaaagtcatccacttctcgctgctcggtattgacttcacggacaggcatgggggtctcgaagcctgtgctcacatgctgacaggctgagtaagtcccatgtcacccggtctatgtcgccaggctgtcttggcaccggatgaaaagcccctcggaagcactcctgtgtctacttctcagttggttgattcttttgagggactgtggaggtcagagatcagtttggttgtctttgtttttattttcaccccccagtctcctaagtgctgcctgggggctccaggctctcaggagtaggtgctgtcttatgtgccctgccttgtctctgttctccactactcagcctgactgtgggtgtgtctgcatcacaatgacccatctagatttctcccccctcagtttgtcttcccaattacttcttcgaaaatctcttgtaaaaagatatacagcgtgctctgtagctcttagcaggtgagtgtgcttgcgtggtctttccgctgacctcagaagggtagcggggcggtgcatgttgtgcagtttgtaggtaagtgcagaagctaaggcttagagagcggacatgacttagccacggtcgtaccgcatcctctattccctcacagcctgcctcggtccagaaggattttagacagttaaaccagaagttaggcagttccttgtggtcttcctttttcccaaggaaaaaaaaaagtcaactttttttttttaaagtttaaatgatacgtagcattttgatcaatattacaatgtggacggtgctcagtttaaattgcacaaaagtgcatatgtctgcccccttttggaatgtgtgggagtcagaaaggaaatccctgtatttggtttcctaaagtcatgagctttctatagctgttagagccagagccagacatgtcagtgcttggtggcacagcccccaccccggctccgagaatgttcgagttaatcttcacacagctctgtgacgtttgtcacccatgggcttcagtttgtagatggtgccagaccaaatcttaaaaaaatggttgcattagtaggttatggggaaggcttatactcctttgtaaatgagaacagttctgtatatgttcacataaagaaacagtgcacaccagaaccacacagaatctgggccacaatctccactatattactccctgcatctgtctcctcttgtactttgttgtgtagtcagttcggctccatcatatatggaaaagggaacttacttacctggcgtttccctctttgcagccatccccttcctgaccccagcagtaactcagcgaggaggcattgcggcttgctctaactccagccgctcagtctctttggaatgccagttctgcttaggagggaatgtggggaaatgaccactgaggggattagacatcatttagaggtttaatgacggaatcaggtcatatgtgcttaatgtgctaataagcacaagtaagctgtgctgttttgatggattgatgtggaaggatcctctcctgggggttgattcttgtatgtagccgctttattttgcggtttctgctggcttgtgtctccagggccacagacacgtgcactctctgacttttctggacgtctgcattctttcctcccacttccataaagaaaacccttctgtgttgtgttcccccattctttctatgttcaccgccttccctcttagtattcttggtgtgggcttctcaagttcttatgttttacatgtgttggagaatttaagggagggtaacaggaagacttcataaggagcctatggtgttggtgctgcactggtgtgccattgaagtctaaatagaccttgcccagcaactgttgacataaaggaactgacccaggagatactgagacagccaacacagacggagagcggacagcagtgaagcttaacggcttataggtttccgcctgtcaccagatctttccacttaggcatttatacatactgtcagcagctcacaaacatggttttttttttttttaatgtagtattgcttttgttatgtgtggttgtgttttgctggcatatttatctgtgtaccacatctgtgctcagtgcccatgtaggacaaaagagagtgtcagacaccctgggggtggagttacagatgactgtgagctaccatgtcagggctggaatcaaatgtgggtcccctggaagacaaacagctcttaattgcggagccatctttttagtcttccaaaagcttgtcttgaggtagcagagtaagaaacagagcccaaactctaataaaacaaaaacacattaaggggaaaacaacaaaattaaatttaaaaaagatgaaggaccaggcttagagacaggtggatggacgttaagtcaatgtgattgcccacaggtgtgcatacagcttggggacactgaggcaggaagattgagacttcacagacagcctcaacttcatagtgagactttgactcatcttctcttcccagtctcccatggtccatcttgattttctctgaacctagccctgtacagaaaagatagggataaacaagaaaagtcattaaaaatgtcatcagagccattggaaaagtgggaactgggaaatgagtcctgagagaggcaaagctttgtccccaccacgatacattcctctaccggtggataaactgctttcctgtgcctggaggctccctagataaggactgaggtatgctagggtcatgctcagcgtagcatggaagggaacttgaatgcatactgtgaccggcttgcagagaggcctgcctgtgttcttgtctgatccataatggaaaaggactggattgtttgctctgtagttcatatgttgaaaccctaatctcaaaatgtattagagcataggactttacagagataatgaagggtaggtaagtgaagggcctaatgagaaaaagaagacacggagtgggcttcaggtagggaaaagaattcatcagtcaaaagagaatctgcctcaggtaactggctttgaacatgtggcctcttggagagaggaaaacaaggattccactgttcaggccttactctgtggtggtctgtcacagcagccttgtccaaccaaagatgacactccttccaggtgacagaaagacaaaactagtgtagagaagaaaacggacatcatacatggggcggcatggaaggagatgtcgcctgtgaggccgttagagcagcagctgttgaccaagctacccatttatggtgttagtataatggaaaccaaccagccagagtgggcggtatgggcggtgcagatgtgctctggtaggaggtaggtggggctgtgggttaagaatctattttagaaaaagtactggtccgaagaagaggagagaaacttactgacatttacatttaactacatttaactaaatagtcaggaagacaggagttcagaaatgaaatagttaaagggatggtttgtaaggaaggttgctaaaactaagaaaacagacgctcaaagcagcacttcagagcatgcgaacaaattaaaatgcaagtgaatagaacagactagaatcaaagttacagaagaaatgactgccatgaacacatgctccttcagttgtcagggaaacaactggaaggacaaaccgcagatgtaagagtcaagtacagacatatggaggtagacacggttccagtggtaactaacttgtcttcaaaatctggggatggtcaggaaaggccagttttacatcccgagtcaatccggattatccacagcaagctttagatttgaggagtaagaaaaatgtattgaggggaacctagctggttgtctagttttctaccacaatgttgatacatattgaggacctaattttggctttaaaaagaaaaaaacacacctaaacatcaaaacgcaaaaataccactgctgcttctgaccacagtcctctgaatttagatagtaaaaatgctaatactaacattagcaaaataaatactgccaccatattgatctaaaagcttatgtatggtacatgagatccaagtaggaattaaaaaaaaaaaaaaccctggaagatataaagaaaacgaaagatcatgaaaacaagcatgatgaaacttagagaagactaggatgaatcttagagcattcataactggaagtgcctgcgtgtgttaccccgtgagggtcgcatgagcaccacctcccccagcaccagtcaagtaggaattgctgatccttctgagggagaaaaaaatgcacatacaaatttgccttacactctgattcagccatagagtgaacacaagcacctaaacccagggctgtgtgaagggctttcagagccactgtggttgttcacatagaagatagaagctgagactgaatgaagctaggtgagtcgtgtgaaagacactccgggatttcccagagcagcatcctgtttcccaaacactaggctttggcattctgttcttattcttgtttcttcttgaagcaaggtttccatagcccaggctggcctgcaactcactctgccattagggctgattttgaactcgcgattctcccagctccacctcttcagtcctgggattgcaggtgtgtgttctgccatgcttagctcgggaagagcagaactaacagttatcggttcgtgcttagactggttctcaggcagcctctgaagggaagctccctgttagcaggcagtaacactgaagctcaggagagagatgaatattatgtagtgatattaaggaacatctgcaagtagcagcagtacagtaagcttttgagtgttcaatttaagtttattccatctgaatcgcagttacaaaatttgtctccatatttgggaaaacattgatgcacactgcatgaataagtcaaaggagaatgtctttcaccaaattcctgaaaacattagataaaatttacaaattcctaacaacactttgaaataaattatgactacttagtaaaacattaatatgtatttagctaacattatatcatattttaaattgttagaatgatacaactcacagaccgtatgaagctcaagaagaaggaaagccaaagtgtgaatgtttcagtcctacttagcagggggaaaaaaagaatactgaaatatagctactattaagtattattctggaagtacaagaaaatggaaaggtggcaaatctaacctggaagggggaagctatttatattcacaggtggagggggaagggtgaggaacattacagctatacagttatcagattagtgagggtgggagaaagcaatggtcatgcctgaggacagcctggagcacaggaattaggacgtacagtgggttgatggatcctgctaacattaacttccaaaaagacgagtcatatgagtgtgagcctacaccagcgaatttagaacagccttccaagaactccaccacacacacacacacatgtgcacacacacacacatatatatattttatttacttattttatttatgagtacactgtcgctgtcttcagatacaccagaagagggcatcggatcacattacagatggttgtgagtcaccatgtgggtggttgctgggagttgaaattaggacctctggaagagcagtcagtgctcttaactgctgagccatctcttcagcccccccttttaatcagtcagtcaatcaatcaattaattaaatatgagtacgctgtagctgttttcagacacatgagaagagagcaacagatctcattacagatgtttttgagccaccatgtggttgttgggagttgaactcaggacctctatggctttgttttctaagggcaagaatgcatgtctgtgatgggttggcattgtccagcaccatttatacgctacatgagcttggacgactcgtgctgttactttctgttagaatccaaaagtctaatcttaatggagatacagaaaagaagagcagtgagcacgggctggaaaggatctagagggtggaggaggcagaacttggtcaagcacacaagtagttccatcacacaggagtaggttttgttgttctgcacagtagggtgctatagttagtaattgtgaatatgtgaatatatggtgattctgaatgtcctcagaataagggttgcatgtgatgggcattcttctgtctacttattcttctgccatacagaatgtcacagacttcctctcaagtctttggagaaatgccgttcttcactgccttttaatacaaaactcatgtgtgtggaaaaatatattggggccattaaaaaagagtgaggcagatttgtaaatatcagggactgtggtgtacagagtaggctgaccccagaggtcctagttctggaaggtcagagatgtgtatctcaatgctaactaatagactatggcaaggggcagttttctgtcgtataaggctgccttagcagactggagagcgctcctactgggcagcagaagcaagcagccatgtgtgaattgccagtgaagatggcagaggatcttggcttgccttcagcacagtcagggaaaaaagcctcaacttcatggcacacagcaaataacggaccaagtgcttaggtcaggagactcatccacagaaccacctctagagccgaccgatatttttactcacagcctgaggacctaagggcctttggagcaggggattcagctaatttgtgctatcctcctgactccttgaagctgtaatgatctatagctgtctgattgtatactaagaatcaggaaatacaatcttgatgaatgtatttgtaggcagtgagattatgataagttgttcaatcaaaagttaacacacggaagtggaacactgtccacatgcctgcgtccttctcagttggaaataagatgaaaatcccatgcttctgcttcttctaatccaccctgatgttcacaaacccatgcattacagtgcattggcctgacctctgtggtcttcctacagcagatctacctcagcctttgccttagtcatgcattccttctgtatagactttgcatgtgccatagaaggctttcagtcagcattcacctggataactaaatagctttggaccaacttgtgtattatgatcttgtgtatagtaatgccagtatagaagtagacatatatgcaggtttacatgtagtaaacttagaattttttttcttcagtttaagttattagcagtagttgtcttatgggggaaaagagtattagggagaagcaaggtttaagtgagtgaattgtctaacattctggtatcagaatcagtagtgctgttgaaatggagaaatggtggtccatttgtaattttctagtatcttactaaccaccagagactgaaatttattacaggataacaaatatttttttacatatgccggttatctgtcaactcagatcttctgggtgggaatagaaatcctggagagaccaggtcttagatgaatagacttaagaattagttggttcccctgagcttcttatgtccatcagtccttcttatgcctgtcagtccttcttttctgactaagtaagttcttatgtggctgttttgtccttaggtgacaacacttgaagtgttagtgagagagagtgtgtgtgacctttttagcacgtttactgtgaagcttggtggctgctttgttcgtagccatcatctgcttctgtgtgtacagggttggatgaagggtggaaacacatgcatctcactgtggcaaagatgaacagattctccagcccttccccttcatcctacaacttcttcctgtggccaaagatgggcagcttctccattcttcttaagacactttttgtgctacacaaaaaaaatactcggagactgctaggccacaagggaggccgttctctttggaagggagagggagagcatgctcctatggaaggggtggaggggatggggggggtggagggagtctttttcctacagtaagcaatgggccctcatgtttcagtggcactgctttggagattcctggttgacttcccaggaagttctcttccaaggagacacagaacattctctgttacctgtcacttttgtaatataaaactttgggaagtggaaatatagaagtggatctgagaagctgttagccatcccatgtggctctctgcataggaaaagcagttccacgttgctggccactgggcagtgctttccacgtggatgtggggtctgggcatgcacggcaggagctctactctatcattggttcctgtctggttcctgcccctttctttcctggcacaggaccctggtagagacagacatttctccctccatgttcctctctgtgcatcctcagcctgtgtatttcactggtgggttgaaatgttctggtcttttctagaaccactcaagccgtgctggatggtacctgatagattttcttgatttacatattttgttataaacaggtgtacgaaagaaagattaaattcctgtaggtgccacgggagttgataaaacttctggaaggttagcccttgggctttgggtcagaaacctctttctgtgtctatggcagatgtacaaaatgagtgggaaggagggaaatgaggatgattggcctggagttcagtgtgtgaaattgggaggaggtagagctacccctgaggcacgcacacactggtagcttgagaccaggcgagaggagtgggtgaggaaccgttatcccatatgctgaagaaagagtcctgtcacctttgtgggattgcaaggccacgagaagagttgcttgccagatcaggtagcttggtgacagttccacattttctcgctcatgagttaagtgtcattttgggacactagccgctcttccttgtgaaatgcttggggagcaaagcttgcagcttctgaacgaaccagtcgggaggtttccttctcctcagatttggctggcacgtgtcttcctctttgctccctggagcttaatgcaggcccatccccaacccatgaggtagtagattagggcctgaggatggctgtggagacctgctggattgctttttcagttcctgtaatctctgccccacctgcactggccagataggagagttaaacggagatgtggtgggaaccaccacccctgcatnnnnnnnnnnnnnnnnnnnncaagtccttgatagtggcagtaatttctgcaatgcctccaggaatacgatactgtttttgattcactattttctttggcagaggcaactctaaaggcttccatttggcctttccaaccataatagccctcactctacagttcagggaaccaatatgagaattctgccaatttctgagtatatctatcccaattatacattctggaactggggaaatcaccacaggatgtgtccgaggacctactggacctactgtgagtcgaacatcagtcaaaactccattaatcacctgccctccataaggaggctgttgcttctggttggcatctcacagaaggagatggaagggagtcaacccctggcctacatctccttagtaagcttgcttagatcagcgtctttctcttctgaccatgctcccctgcagtcacttgcagccatcgaggtgtgacatgaccaagctccttcctggtttccttgtccacatgaacccttctgctgtctttatgtggctgcttttgaagacatcttcatttctgcaggctcttccattgctggttgcttgtttccagtccactagaaagcccttggccacacttcttacttaggtgattgcttttgtcatttgttcccaggcatgtccagtctggtctttacagtttcgcagtgctgttttctagagatggtgtggcacgttggctgtggaagcggagagaggccagctggctgtgatgcccaactcaagagactgcagcgcagaaggtggtggtctcctcaccacattgttgttattgcttgggaaaagaactggtttccatcaaaaacacattagcattttctttgtagccaactcacacatattttaaaaggtttaagaatttaatgtttaatttggaatattgtcagtcaagagatgttatctatataattctttatgatcttcactaatttttacgactacgggaagaggtcaccagatgataacagtaagatcatctagtatctggtcggttcccatcacccgtgcagggtcacacacacatggttgtaatcagggtaattggacatctccataggcagcctcaacagccgtcattaaaaaaaaatagaattaagtaaaaagtaaaaacaaggacaaattcaggaactctgacagcattgtcagagcagaattgttagcagtatatctatgtgtctgtgtaatctagaatcaacacagtgactgggcatttcctggaaatgaagactgcatccagcctcactccacgcctgctgaataagaatccacctttgagtaaggctcggggtcgttggtgtgcacacacatgcttgagaggctctgctttgggaggtgatgtatgctcatgatgtcttgcataagaagactttggtccaggactcagtccatgaccgggtcgttcataagacgtgtcatgtctcttgattgtctttagtttttatgattggattcaagctttgtatatggttctcttctaagtgtctcatatcacagttcattgaatagtagtagtaaccagggaaactgcattgatcacttggctaagacattgtattgctacttttcttgcacccaacaaaagcaactaaaagaaggcgggtttcctttatctgacacggtccagcgtggtggggaaggcagggcccagggggctgagaactgcttacactgcagccatggtcagggagcagagccacgaatgctggtatgtattacctcagtttctcttttggttcatctcagaaccccacgtttagtgtgcgtcttcccacgtgagttaacccgatctgcaaattcctttacagaaacactccagggtttgttgggtagagcttgtcacgttggcagtctgggttgactgtcacagtggtgggctggaagactgaagtgtccctgagctcatcactggcaccgatgtcacagtcacataaggcttccactcaatcagtggcttgtggacttaaagggtgatattcatagaaattaggaggggccgtttagggaggagttttcttacagatcccttaggtgggaacttgagagaaagaaggcagagctcccatagagcatgcggatcactgggagtggcacaccactgaactggtagtctagggactttaacaggaggtaggacagaaactggggtgtggtgcagggggatgagctgtcagtccacttgtcccaaccagattgtgtcctgccgctgcctctcagctttgtctgtgtccttgtgtctagactctaagcagacctgcttatgtaggggagagaagaataagaaactgaacttcctttctgacgtcccaggcctctgaccaggcccaatatcgctggcctttggtgaggacattgctgcttaaagagcaaattatgcttttatttatttatttatttatttatttatttatttatggatttttgagacagggcttctctgtgtaaccctggctgtcatagactcccttttatttatttatttatttatttatttatttatttatttatggatttttgagacagggcttctctgtgtaaccctggatgtcatagactccctttgtagaccaaactggccctcacagagatccatctgcctcggcctcccaagtgctgggaacagaggtgtgtgccaccacacctggatacactttatacttttagatagtttctgctaccgtaaaactgcctgaccatttctgtctcatttgtagtatccaattacttattataggagaacagaccatccaaaattcgattttcaactaatgagtcttgttttcatgagtaaatgaataagggaaggcagaattcatttgccttgctccataatacctgagcctgaggtaggacgttttcagcctcttgaagggctgttgggggcagccacctggaagctgctatatccacatctggtgcctggactgggttctctcagagtcttggttcctgccaatacatggtttctgcttgtagaataggcaggcttctttccaaatgtggctaccttagaactccaagaaaatattctggccaacaaggcagaaacagagagcctagaggctttcaaggtctagcactagataccctatagcccattctagcatacacttctgtttgaaggtgttctgggcctgtggagatgtggagagaagagcattcatgtcccctattaatgaagattatcaaaggaattgtcatattgtaaagttgtcacaggcggtgaatgcttagactatttgctgtcaatgtgtctcctttctcttagcaattagcagtaacttattaggaaacaacccaagactattcaagaatcctgtttcttagcaaattttcactcaggtttcaggattagttgtcccaagtttattagataggatttaattatgagaaaatcttcatgtgctggtctctggaaataaaccctcaatggtgacagcgttgattctggaactcttacattgagatagagtaagtttatctgatgctgtctgataggttctttttttttttttttttccttttttcttttttattaggtattttcctcatttacatttcccatgctatcccaaaagactcccataccctccccgctactcccctacccacccattcccactttttggccctggcgttcccctgtactagggcatataaagtttgcaagtccaatgggtttctctttccagtgatgggttcttaacctttcattccaatgagaatgccaagcactctacataactctgtctgctcagttcctagcctttcataccaacacggacactaagctctttattatgacaatgtcaacactaatttggatgaaggacttttgctgtactctgcgtgtggctctatggttattttactcgactgttcttactctttctaattaaaggaatgtgttcagcagtgcatgaatacacccatcaaatatgtttgggaacgtttgtgtcaaagcaaagccggtcttaggcctggccagggtgagctccctggagcaaaagcttccctttgctcttgaagcataaggaccgggattgcaggagggacagagcgttcccaactgacgagggactcaggtcctaggtctttcctcctttaaaggtacaggaagtagggaaagatggattttctgtcacctttcgagatgtatcactttaagatgtattgatataattaatacagctcacaccggagaagaggctggtatttagctctgggatatgtgatttcccctatagacacagtttggtggaaagaattggaaaggcaggctgttaggttattttaaataggcatttgtgactgttcttaagtttcaatagcaatacatgatctacgtattttaagttaaatctttctctgaagtttagttttgatagatgcatgtagcaaaggctatgcctgatatatgtagccaaggacagaatattgagaatcccagaagccgagttccattatgtagccacatagagtgtattggttgttttcctctttaaaaccagacaagacctcagagactagtcagcaaagctttaaaggaactgtctgggtggagtttgtggatatttagttgcttttcttattgttgtactaaaataccctgacaagaccaagttaagcaagagagagaagctttattttagctaaagttacagcccatcatggtggagagggctgggggtggggtggggggaatggcaggagactgaggcagctgcccccatggtcagcagacagagaatgttaaatgcctgtgctcatccagctttctcccagaccatggaatgatgccacctacagcagtggatcttccactcgagttaacctagtatagatgagataatttcatacaggcaggaccaaggctagcctaatggcggtaaagcttcaccattatttccagaggctttatctctctggtgacttcagagcttgtcaagttgattttaaatattgtaaacatttgacattttcaatattgcaaaacattaccaattttgtagcatatgaattgtaatgtgaaagaaaagagtgttttggtaaagaaggaaacactgttgccatacattttagaaattgtggttagctataaaggaatatccactgccacaccagcgtgacctctcaaagtgccattgcagagggacagtggctctggtgtggttctgctttaaggagtccagtcagtgctcacacagacaaatgagagctggaatggtctcttaaagaggcaggccccttggaagagaccttgcatgtgtacttggaagaggtttcagatgattgtggtaaggtttcttcctttgtaattaaaatccacacattacattttggagatttaacccatgcctttctgtttgctactagaaaactgttacccagcttatctttgttccgaaagattttgttgaccttgaaaattctttgaggtgacgccagctacttccggatttgttttctggaaccagagcttccaagtgagattcctgtgagataggacatttcggtcagagttgatgctagatttaaggggtgcttccctcgaggaaggcctgggtctcaggacagcaaacggtaggcttcctgtgcggacatcttctgtactgagtccaggaccgatttctaggatgcttccggttccgagaaaaagtgaacaagaagcaagcaggtgtgttctcactaaaaagaggtttctccagatcaaagcaggaaggggtggggcaagtatcagtcgtggagtgcgagcatacttaacataggacgtgtttcattaatgctatttggacctttattgttttaaagttttttacttacatgtcagtaagttctattgaggagaaaatttgcagccatttgggctctggaagccgaatctgctgtgtgtggagaagcactttcaaatgcagtgctgggcttctcgaacgtgtgcaggtgctcatgggtgacatcacatctggagtgatttcctaaacgtttgcaaaccagaaaccagcattttatggttgggaatataaccatattctgttcacaccatggtctttgctttgggctaaaggggctccctttgtgtagctaggagtacgtgactggtgcgcatcgtaactggcatttggttcataatattgtcagagttttaatggccatggcccattgtccctgcctaacatgggcaaggtattatagccactgctgatgccatggactgtgcctgtggtggagtgctggctgtggaggtgtgcgcctctctgtaaaggctgatgggaaactgttgtccactgaaactgctcaagcagaaactgcagtcagctgggcgttactctctagtctatgagagcggcagaaatcagtatctattgaggcctggggatgtgtctgcagatgtctccccaaagaaagcctaaactgtagaaagaaaaaagaatgctatcagcttcctatatctgcttaacaaaatttgttttttctttctttctttctttcttttttaaacttgtaaatcagagctgaaggtgtttttcagaagagacatgcaaaatcagagcctgagactgtgggaagaacgcgcagacacagcgtgccctttgctcctgtcttccctctagtcctaaagtccctctccggtttcctgtgataggaggaaggatcttctactgatgggtggcagtcagacccttagcatgctctgctgtccagcctcagggcctcacgaggcatatgagaactcagagctctttgaggaattgtggcacttgcagaatctatcccgaagaggtgtgttgttccttggtagccatgggaaattggttcttggataccatcccctgccccattttgccataccacccatgggtgctcaaaccacttatgcaaaacagcatactatttccatataacctctcatatactcttgtatactttaagttctcttaccattaatatagtataaatgccatgtaactagtggatacattgcatttttatagaatagcaaataatgacaagataaagtctatatgtatttactacagggataatggctttctccaaatccgttgtctctgtgaggaaggccactagtatatgtacagagtgtactttgttggggacaaagccttggtgccaatagaatgctaaatagcagttgactcagaggaccatgtctggggataaggcctgagtttggcattgacgaatgaagggtacagaaggaaaacttgagcctcagggacgtcagtttgctcatctctgcagagaggttggcaaaaatgctttccagctcagaggttctgaattttaatgaaccacaaccaatgggaagccttaaaatcctcaaagccgaacctgactggtgtttgtcagcccccattatgaagtctacttgattgccttagaatagatccatacgtagtcctggggttgggctagctggtcagagagctggaaactagttttcagttttacttgtggtgtacaggaaggataaaccaagagcaagccatcagtgtgtgcttggattcccttagagccaccttagtcccacagccccacaattttgggagggagaatgaatttacttgctactgtgtgctggaaatctctgcttatgggaagacaccatttgtaggctagcacatcactgtggaggacatcagatggatgggacttaactagcgcacggtgaaattcagtagctgtgacttgtattctggactcagaaaatctggtccaaggttggtataatgtcaaacatattgcatgtgctaaataattaacctgctgctggagctgccagaagtatacaggaataaccaacagtccttcaatactggaaaacaccggactcctgcagaaacatgtttgtgaagatgaaggattttatcctctttcagatgtgatttgagttgggtgctgatgcaaaattttcagacagtccttcacctctggcacgagtgatggagtctatccacatgtggctcctggtggcatggcatgaagaattggcagagccgtgtcttcttctgactgagtcctatggcagaagcgtctgcctcactacatctgaggagcctgtgactgcgaacagcagtgacagtgacagacctctgtttgtgctagcacttgtgcaaagacctgaggaagcgagacctgataggctttgttttattgttaaaagagtttttggtctggatttttattatgctgtggagtgtgaagaagtgttttacccataaagaggaagttttgagtaaatttgatgtatccttaaaaaaaaaaaaagatacaaggtagagtgctaaattaaggagtagaaaatagtggagacaagttaatgaagccagggagccaagcaccaagaaagagacctgggacagggaaagtgtgcagcgagcgcttcgagaaagatgttttggaaatgtacagcaaaacaagatgagcaatacattctagaatcagaaaacagctcggcaatttaaagtaaaagagctttgcttatctcctccttgagacgcaaaaaggatataatttaacagcattcctacacgttgcagagaaaatcataacaattaggtttgtatgcgtgttgaagggacagtctttgcactgctgctagtacactgaggtggctgtgtctgaattgatgctagcacaatgagagccgaggtggacgtgcctgacagaagcagagcatcacccatgggcttatgtccacgagccccaggcctgccttgtctaaacatcgggaagtgatttacatttgaaatttcagtgttaagttagagaaatgaagacataacaaactgttgcgagtagctttctgctaccctgccttagttctgggaacgggcggtgctgccagctcctacccagcttccctttaatccatggataaaagaaggcaagttccttttcaacttgacttcttggcacagttgctgggcgatatgatctctggcctggaaaagcgtgcccttatcaatactcttagctccatacctcctacctgccctaactttagctgctaaactcccctgaccacccgcctgtgggagcagcctgtgtggccactctgttttgtgatctcacatggctggtcatcttttctccattagaaacctgtcgaaccctgactcctcccttgagtctcccttttcctccagggacctggaagtcctgactgtaccttttgctcagcaattgacccatggctttctttactgacagatcaagaactaattggggaacaggaccttagcaccaaaactgctcctacaacaaacaactgtttgagtctaagttttgggagagtcatggaagcagttcatctatacctgtccttttagcgccatatgtgtgcctttctctagcacaccagactaactgctcagagcactagctctgagaatatttgcgatggtaggagataggccctgccttgtgaagagagtgcttaagcagatccgtgtcctctgaatttgagtttattgtttatgcatcactgtcaccatttgttctgagtcctgtgagcctagtgctgtactgaaagtggattttggcaagtctcccagttcactaacatcagttccaagcatcaagcccagcttccatagctgctgaggtcccagagccaagtcagtgctgtgtctaatgaatacctcggcttggtaactgtactaatgtagagggtggttcagctctctggatgccagtccctcaaagaatttattaagacagtggttggtagctggaatctttgagtcatcatatacataaatgggatgggggcgtgatctaaggagttgaggtgtgtgtctagtgccatttttttttctgaaatattttttggtgttctgatttttgccgtcagtctttcctgttgacttcccaagtcaatgtttctttgctctagctacacaaaagaatgccctgggagctttaaaatgtaaatcaaagcaaagcaaaacaactcaaaggtgcatattctggtgtaagcccagtagtgcctgttgtattctgaagaccagccaatgtttggccccagttcctggttcagagctaaagttctgagaggaactcagttcagtcttcaggaaatggtggagtcacagttgttttggctctgaggttcaggcaagcacctttatctccttcccgatagccttatctggacatcccatcttcaaatgcagtagaggaagaggcacaaggatggctggcacctgcaccttgctgtctgtgtgggttttcaggaaggcctgcttggaaagtcatcacccgcctagtgccagtcttcagagcctaacttctccatggtttatgggtgctttggatgtcctggcccaggatgttgcttggttttttcttctggtaacatcccagaggcatctgccttgttggtagaattcaagtgtagataagtttggggctgttatcaaagtgtggtcatagtgcagttctctctgagtgggattggcttctcatcgtctctccacccaactcttctgctccccattcgccacttgaacagcaacaatggccacagtgcagctgggccagcctctggcagcagagagtttttcaaggcacgtcgtcagttttcctgtgcactcccgattttctggaaagtccctgttagcagatacaatagcagacaggattttcattagcaaatgcttatccacagcaatttaacaatttcttattctgtttatacatgagggggcagtgtgacaccataaagcaaacaaactgttacattagcttatttttattggtgtagggtaatttttaggtgacatttctaggatgttcagctaaacccctttcactgtcaggttttccaccgtggacaccagtgtaaggcacgctgtcactcagcataagtcacgtgcttgattctatcagatgagtaggcagtagctttagtgctttttacttgagtttacacttacattcttttaaagctgcgagcttgcttcttgtctccacctgaggagcgtgccggttgcctgtggttgcagcgtctgtcaggcccatggctccagtgttttatttcagggcttcattgaagactacaagactacttgtgctagaagggagcctttaaccttaggtccgggtggccagggaaggtctgtgataactcactgcagtgcggtctgcctctctttatggcacatgtattactttgtccaaaggaaaacaaattgccaagcaaagaagcagcacattttaattaatgttattatatctgatatatgaatgacattgtagataaatcaaggtggtaatgttctgggtctcagaaatgtaagggaaaattattaagaggggtggaaggcattaaataaattgatgaactctataaagcattaaataaggaaattatgaagaatgtaaataagaaccgagacaggtaattgcatagcgcaggctattttttaatgtgtaaaaaaaatgtttgcaaatggatgtttctgtttgtgtagttggaagaaaagatcaagttcactgttttagcataagaactttgtgaacttaaagggtacttagtgttttaatactgcatcctggctaccttcttttgggaatgaagggttgcggttttgtctgcctcatgagaaaaaccattgtacttgttttctttcggaaaaatcttacttgaaacacaatgatttgatagtgttttaattttaatgagatgctttattttgaatttttatgttaatcttttctgatgttaaattcagagggttgggatttggctctgacccatcactaatgaaccccaagtctactgtggctggactctgctttactccagcagtgcacaggtcttactcacggacacccattgtcatgtttcttactcaatgacagatttttcgaacctcgcctgataccacatttgctgagcccacatgcctgtcagcatcacccccaaacgctccaccacgacagtccaagagacaagggcagaggacgaagagaccagtggccgtgtacaacctttgtcttgagctggaggagggtaaggcgctgattgggctttctgctcggtggcatggcatgttgactgcatgacagtcacacaccctctgggcagtgtgttgtgcttcagtctcagttctaatttctgtcccctcagattgtaatgttttagattagcagggagggtgacgctttctggtcagagagaagaatgcaagtttctgttttatgtttgtttttgttatgcacagttctttttttattttgaagacagcttaaatttctcttttgggagacttgtgtgacctcctgtgaggttacataacccagagacaaatggaactaaaattaaagcagacctttgatgtgaggagctagtggagccaatgcactgctaatgcgtctggattaaaggcaccggtcggtcactgtgactgtggggctttgggtgtctgcaccatactgaaccccgtgggctgcagttctctcagtcatgtcaaaagcctgcagtggcagacggacctgcctttgaagttgggttgcaggagctgggttcattggaactggggcaggtggtggttttcccgtccaaccaggctatccctgccagctggctttcagctcacagccatggctgagccctgagccccacaaaagtcgattggtgattcgtggtcatgtggttttgtgtagagtatagggtgatgtggtgtcaagccagtgtttttacatatggctcctatgatgactctctcctgctgagtcagttctccagatttaagatgcttgctgagttgtttgtttgtttgcttgtttgcttgttttttttgtcttcttgcttcaagccctcaaatctttgtattcctttccaacagctgaggctgtattgattggaaacaaattacagtacccacatcataaacatgaagagaaaagtgtctattggttcatgtaagcaactgatgacggacttcaagcgactggagggtgtattcagaaagacccagaatgccctggtcataagaccaggggtatgaactctgcttgtttctttctgaattgctccatgtgcacatgtgccagaaatacagacagattgtgttttcctggagaaatgtgtgaatcgttaatatcattttctaatatgagagagagagagagagagagaggcccactctgtatgtgtgtgtgtgtgtgtgtgtgtgtgtgtgtgtgtgttagaggtcaggcattgtgtaacctatcttttgaggagtctcttcttgaatttggaactcactggccttcaactctgggcagctcctcatctctgccccagtgtcattctgtactcgggttacaggccagaaaggccaggctcagctttttatgtcagttctggggatccacactccagtctttgagcttgatcagcaggaactttacagaggccatctcccgagctcccagaagttctctttagacttgctttccatttgtgatcccaactgtgttttctccccttcttctcactttcattctatgtcaacagagttgctaataaggagtaaaactgactggtttgagtttcaccttctcttatgtctcacctgtcctggttgaagtgttaataaacagtgaaacaagcaaatgtcagaaggtaggaggagaagaaatacacacaacacagagagctacccaatggccttcaaggaaagcagaagtctgtttgctagtggaggtgatcagattcaggcattcatctgaaaatagatccacattctactattcttcggaataaaattatatcttaacaagtctacagaggtgctatctctgtgctaagcttctaaatgattattaatggctgagtaatgtctgttaacagtattcacatctttgatagaaaacttacggtgcctaagttttaggtaatgtatttttcctcagtgccaggcaaatgctctgccaaggaaccataatcatcactgatgttaggcttctttgtttttctgactaataaaatttatttgaaaatgtacagttcagtattgactttttttacgtcatcaaaataatttataatagttaagtgtctcttaaatatacatgatattttctgaaggtaaaaataatatacactcaaccagtttttaaaatctatttggaaaattaaacatgataaaagtaggaaaaaaaaacctcttaagtcctctatgaaaggaaattgtgacaagtttctgattagaaagaaaccattccatctccaagggagaatgtgcagtgtaactgtggcttcatagaatgaattggctagtgtttcttctgtttctattttgagcaatggtttgaagagcacctgtattaggtcttctttgaagatctgatagaattctatactaaacccatcaggtcctgggctctttttttggttgggagactttaatggctgcttttacttcgttaggggttatgggactgtttagatggtttatctgatcctgatttaactttggtatttgatatctgtctagaaacttgtccatttcatccagattttccagttttgttgaatataggcttttatagtaggatctgattatttttttaatttcctcattttctgttgttttatctcccttttcatttctgattttgttgatttggatactgtctctgtgccctctggttagtctggctaagggtttatctatcttgttgattttctcaaagaaccagctcctagttttgttgattctttgtatagtttttttttttgtttgtttgtttgtttctacttggttgacttcagccctgagtttgattatttcctaccttctgctcttcttgggtgtatttgcttctttttgttctagagctttcaggggtgctgtcaagctgctagtgtaagctctctccagtttctttttggaggcacttggagctatgagttttcctcttagcactgctttcattgtgacccataagtttgggtatgttgtgccttcattttcactaaattctaaactctttaatttctttctttatttctcccttgaccaagttatcactgagtggggtgttgttcagcttccatgtatatgtgggctttctgttgtttttgctgttattgaagaccagccttagtctgcggtgatttcataggatacatgggattatttcagtcttcttgtatttatggaggtctgttttgtgaccaattatatggtcaattttgaagaaggtactgaggtgctgagaagaaggtatatccttttgttttaggatgaaatggtctctagatatctgttaaatctatttggtccataacttctgttagtttccatgtgtcactgtttagtttctgtttccatgatctatccattgctgagagttgggtgttgaagtcacccactgttattgtgtgaggtgcaacgtgtgctttgagctttcttaaagttgcttttatgaatgtgggtgccctttcatttgtagcatagatgttcagaattgagagttcttggtagattttttcctctgatgagtatccttatcctttttgagaactttaggttgaaattccattttggtcaatattaaaatggctactccagcttgtttcttgggagcatttgcttggaaaattgttttccagccctttactctgaggtcatgtttgtctttgacagtctggtacatttcctgtgtgcaacaaaatgctgggtcctgtttatgtatccagtcagttagtctatgtctttttattgggaaatagagtccattgatattaaaagatattaaggaatagtgattgttgcttcctgttatttttgatgttatttttatgtttgtgtggctatcttcttttggatttgttgaaagaaaatttctttcttgctttttctgggatatagtttccctccttatgttggagttttccatctgttatcctttgtaggactggatttgtggaaagatattgtgtaaatttggttttgtcatggaatatcttggtttctctatctatgttaattgagagttttactgggtatattagcctgtgttggcatttgtgttctcttagggtctgtatgacaactgcccaggatcttctagctttcatagtctctggtgagaagtctggtacaattctgataggtctgcctttatatgttacttgaccttttccccttactgcttttaatattctttgtcttgtgcatttgctattttgactattatgtgacaggaggaatttcttttctggtccaatctatttagagttctgtaggcttcttatatatttatgggcatctctttcttgaggttagagaagttttcttctataattttattgaagatatttattgtccttttaagttgggaatcttcattcttttctatatatattattcttaggttttgtcttctcattatatcctggatttcctgtatgttttgggttaggagctttttgcattttgcattttctttgactgttgtgtcaatgttttctatggtatcttctgccctgagattctctcttgtatctcttgtattctgttggtgatgtttgcatctgtgactcgtgatctctttcctaggttttctatctccagggttgtctccctttgtgatttctttattgtttctatttccatttttagatcctggatggttttgttcaattcctttacctgtttggttgtgttttcatgtaatcttttaagggatttttgtgtttcctctttaagggtttttacctatttacctgtgttctcttgtatttctttaaggaagttatttatgcccttcttaaagtcctttatcatcatcatgagatgtgattttaaatctgagtcttcctttcctggtgtgttggagtatccagggctcactgtggtgtgaatactggtttctgatgatgccaagtagccttgggttctgttgtttatgttcttgggcttgccttttgtcatctggttatctctagtgttagctggttttgctgtctctgtctgtggcttgtccctcctacaaaccgatgtgtcagtacttctgggagtctagttctctcagggaggaatttgggtatggagacctgtggcacagggtcagctccagggtgcagacagaaactggaaggatactgtacctggctgttccttggatcctgtgtcctgatgactctgtgcaggtccctcttgggccaggaatttgagcagaagaggtggtcttagatgtgttcgcacgtgtggcacaggatcagctcccaacacagatggaaattggaaggatcaatgttagacttctttttcttctaaatcagtttttataacacagttacatttattattgtactatatatgctatatatgtaaattcatttcagtttttttcctacatttttattagatttttttcttcatttacatttgaaatgctatcccaaaagtcccctataccctcccccagcccggctcccctacccactcactcctacttcttggtcctggctttcccctgtattggggcatataaagtttgctagaccaaggggcctctcttcccaatgatggctgactaagccatcttctgctacatatgcagctagagacacgagctctgggggtactgattagtttatattgttgttccacctatagggttgcagaccccttcagctcttgggtactttctctagctcctatattgggggccctgtgttccatcctatagatgactgtgagcatccacttctgtatttgccaggcactggcaaagcctcacaggagacagctatatcagggtcccttcaccaaaatcttgctggggtatgcaatagtgtctgcgtttggtggctgattatgggatggatccccaggtgggacagtctctggatggtccatcctttcagcttagctccaaactttgtctctgcaactccttccatggatattttattccctattctagggaggaatgaagtatccacgtgttggtattccttcttgattttcttgtgttttggaagttgtatcttgggtattctaggtttctgggctaatatccacttatcagtgagtgcatatctaatgacttcttttgtgattgggttaccttcttacacgcgttctcacgaccggccaggaaagacacaacaaaccagaatcttctgcggcaaaactttattgcttacatcttcaggagcaagagtgcaagcctcaaaccccccattgcttacatctttaggagccagagcgccagagcgccagagcgccagagcgccagagcgagagctctattgtttacatctttaggagcaagaaagcaagccccaagcccaaaaacgaaagcgaaaccccttccctcttaaggagagttatccttcgcctaggacgtatcactccctgattggctgcagcccatggccgagttgtagtcacggggaaggcagagtacatggggtggagaaatacccttggcacatgcgcagattatttgtttaccacttagaacacagctgtcagcgccatcttgtgacggcgaatgtgggggcggcttcccacagttcccccttttctattaataagagcaataggccacccatattaatgagagtggagatagaggtcaaatccccagtgtgcaggtaaaggagccatgtacaggattagctcttaggctcacaggcttttacccagagcaaccctgacctgctcccgtgtcgttttacctggagagaaggacacttggacactcaaccttcttgaaagatgacatgtctccctagaataggctcatatatgccgcagagcccttctactgcagtgcttagccgtgcaactctctcgggctgctgaagcacactcactctgtcccgtgcaatgagactagcctcgtggtgtgcaagagctgagtggccagcgacctattgcttaagcatagataaccataaatcaggggaagcaccatgttctagtcctgcaagcgcctgggcaataaccaccttgtctctcctaagtttgggccttaagcttacagaccaaccagagaagcaacactaatccacagcaaagtgtatctccaaataatatcaatcccacccattctttaaagaaggaaaatgctgaggagatccaattgggtaatcctttggtcagggacaggtccaagcgcgtggagttgacctgaagtctcaattcccaaaggatctgttcaaattcagccgtccaattctgtaacatatactgagaaagactttttgacaaattagctgccctagtaaatttctcatactgaatggaagtaacacacaatcccggaaacttttgttcacatcccagctgagctatttgccataatacatctagttgtacctggacaagatctatgagttgattaaccagcatgagaccaccctgtatcttgacattagctgaggcctgtttatctatgactgtagtcactgaggctgacaaagtgttaatggtgtcagtcatctggacctgtccagacagagccaaggctgtctgaatcaaggccaaacccagttcctagttagtggtaaaaaagcaggggaatacttgagcattatacatcaccggcattgggagtggaaatgtcgacattatcccccaacgctgctctctctttattattgacaccctggacatcaccaagacgagggacatcagtattcccttggtcagtctggatttttcgggtgagtctttctggtatccaaaatgggttgtcttcattctgtgggaaaacacaaatagctcccctggatcttatcaaaataggatccgggccataccatttattatcaaggacatttttccatttaaccatctcattgggcctatctggctctgaacaatgacgttcagccgcagtatggccatgagcatcaatatttaaaaaattgagtgtaaagagtgccatagacacagacactcttggtactcggggtagagtctcgactcccctcttctgctttattagataggctttgagggtgcgatgcgcacgctcaacaataccctgtccttgagggttgtatggaagtccagtcaggtgggtcacgtccatctgacggcagaactgctggaatttttgagatgtataagctggtccattatcagtcttaaggagttggggtttcccccaagcactccatgcctcaagacaatgttgaatcacatgtgaggctttttcacctgttaaaggtgtggcaaacattacaccagagcaggtgtcaatagaaacatgtaaatattgatttctcccaaaggaggaaatatgcgtgacatccatttgccagacctgtaatggcctggcatgagtagataaaatttgacaacaatctaaaggcattattaagtaatcagaatcactttcagtagaaccaatccctctggcagctcaaggaataccagaggaaggaaaacagccatgtaggcttggcaaaattattagttgagctattctgtccctttgtgatatagaaaagacaacttgaggacaagaacagagaacctgaagttcccctttataatcctgatctacaactccagggtggacaataagaccttgtaggctgcaagagcctgcctctgtctctctggccacaaaatctgagaaggactcctgaggtccctggtcgatctttgttcgttgtccagtggcttcacctgctcgggagagcgccttccaggccctaatagccttttcatctgattcagaactactaagaactggctccttgagctcatctagtgatgagtataggttccttctcctagagacctccgctaattgatcttttttcttttcttttttcttttccttacttctaatctctccccaggtattcttacctgacctaaacttttcctcgggttcaagacccgtggaaaggcctgtatacttattttgtgtaccatatttcctctttgctcctactctctctccccgctttacttctgatagactgccctgaatttcatccagaattttcagccctgccttaaccacttgataacatgtgaaaaggaacaaaagcgctcctaacactagaaaaagttcaaggtcaaacataccttgtaaagctatttcccactttacttctgatagactgtcttgaatttcgttagaaaattcaagaccagacttaccttgtaaagctatttcccactttacttctgatagactgtcttgaatttcgttagaaagttcaaggccagacttaccttgtaaagctatacttacgggtaccctgttccccagctgaagagttctgaattcacgcagttgaatccttctcaacagtctgtgatgcgggaacactttattaccaccgttccccagctgaagagttctgaattcacgcagttgaatccttctcaacagtctgttttacgggaacctttatgaccgtgacccgcagttctggttccggaatgaggaatcttccttgcgccggtgatggttaactcccatcccgagttttcttgtcccgggttttttcttcccggattttctcgtcccggattttctcgtcccggatttcggcaccaactcttacacacgttctcacgaccggccaggaaagacactacaaaccagaatcttctgcggcaaaactttattgcttacatcttcaggagcaagagtgcaagcctcaaaccccccattgcttacatctttaggagccagagcgccagaacgccagagcgccagagcgagagctctattgtttacatctttaggagcaagaaagcaagccccaagcccaaaaacgaaagcgaaaccccttccctcttaaggagagttatccttcgcctaggacgtatcactccctgattggctgcagcccatggccgagttgtagtcacggggaaggcagagtacatggggtggagaaatacccttggcacatgcgcagattatttgtttaccacttagaacacagctgtcagcgccatcttgtgacggcgaatgtgggggcggcttcccacattacctcactcaggatgatatcctccggatacatccatttgcccaagaatttcataaatccattgtttttaatagctgagtagtaactccattgtgtaaatgtactacattttctgtatccattcctctgttgagggacatctgggttctttccagcttctggctattataaatagggctgctatgaacatagtagaacatgtgtccttattaccagttggaacatgttctgggtatatgcccaggagaggtattgctggatctagcggtagtactatgtcttgttttctgaggaaccaccagactgatttccagagtggttgtatcagcttgcaatcccaccagcaatggaagagtgttcctctttctccacatccttgccagcatttgctgtcacctgaatttttgatcctagccattttgactggtgtgaggtggaatcacaaggttgtttttatttgcatttccctgatgattaaggatgttgaacatttttttcaagtgcttctcagccctttggtatttctcagttgagaattctttgtttggttctataccccattttttaatggggttatttgaatttctggagttcttcttccttctttcttctttttcctcctcctcctcctccttcatctttcttcttcatctttcttcttcttctttcttcttcttcttcttcttcttcttcttcttcttcttcttcttcttcttcttcttcttcttccttcttcttcttccttcttccttcttccatcttccatcttccatcttccatcttccatcttcttcttctttctactttcttcttcgtcttctttcttcttcttctttggtttttcgggacagggtttctctgtatagtcctcgctgtcctggaactcactttgtagaccaggctggcctcaaactcagaaatccacctgcctctgcctccccagtgctgggattaaaggtgtgttccaccacgcccggctgagttcagcttcttgagctctttgtatatattggatatcattcccctatcagatttagaattggtaaaatttctttcccaatctgttggtggcctttttgtcttattgacagtatcttttgccctactgtagctttgcaattttatgaggtcccatttgtcaattcctgatcttacagcacaggccattgctgttctgtttaggaatttttcccctgtgcccatatcttcgaggcttttccccactttctcctctataaatttccgtgtctctagttttatgtggagttctttgattcacttagacttgagctttgtacaaggagataagaatggatcaattctcattcttctacatgataaccgccagttgtgctagcaccatttgttgaaaatgttgtcttttttccactggatggttttaggttccttgtcatagatcaagtgaccataggtgtgtaggttcatttctgggtcttcaattctattccattggtgtacttgtctgtcgctataccagtaccatgcagtttttatcacaattgctctgtagtaaagctttaggtcaggcatggtgattccatctgaggttctttatccttgagaagagtttttgataccgtagtatttttgttattccagatgaatttgcagattgccctttctaattcattgaagaattgagttggaattttgatggggattgcattgaatctgtagtttgcttttggcaagatagccatttttactatattcgtcctgccaatccatgagcatgggagatctttccatcttctgagatcttctttaatttctttcttcagacacttgaagttcttgtcatacagatctttcacttccttagttagggccacaccaaggtattttatattatatgtgactattgtgaagggtgttctttgcctaatttctttctcatcctgtttatcctttgtgtagagaaaggccactgatttgtttgagttaattttatatacagctactgcgctgaagctgtttatcaggtttaggagttctctggtataatttttagggtcactgatatatactatcatatcatctgcaaacagtgatattttgacttcttcctttccaatatgtaagtacactgtagctatcttcagacacaccagaagagggcatcagatctcattatggatggttgtgacccaccatgtgatttctaggatttgaactgaggaccttcgaaagagcagtcagtgctctaaacagctgagccatctctccagaccaatattagacttcttaaatgttacttgagttttctgtctcatgtttattatttcgtgatgtttaattacatgctattttactcttttctactttataactttggtatttctttttggtgacaaccttagcttttctctttctctaactatttatttatttgagataatttttgttcataaaatatattatggttatgttttctcttaaccttaactcctctcagatcctccccagatccacccaagcctctttaaaaaattcccaatataaaacaagattagataaaatgaatcaaaccagaatagttagagtatgattacagtgaagagacaccatgaccacagcaactcttataaaggcaaacatttaattggggctggcttacagtttcagagattcagtccattatcatcatggcgggaagcatggcagcatgcaggtaggcaaggtggtgaaggagccaagagttctacatctttatctaaagacagccaggaggagattattccacacttggaagagcttgagtactaaaagacctcaaagctcacccctgtggtgatgtacttcctccaaaaggccacacacactccaacgaggccacacctcctaataaggccacttcccatgggccaaggtttcaaacacacgagtctgtgggagccaaacctattcaaaccaccacagggacaaaataggaaagaaaaaaaaaaagtcaaaagagtatacattcacacacacctggaaaaccaataaactataacttataagcacaagatctgtatgtcttcttttataaagcattgtgagacaaaacccttccaaaccactgttgtctgtgctttgtgttggccgtctactcctgggcacagaactcctttaggaggaagcttctcttatgagagctgagcaggatcatttctggaaagagcagaatgctgttagtcactttattgctgtgttctcttagcagagcagtatttggttttcagctaggcacatggccaaatatagtctcaggtcaaccttgaattttgtgtttgtttgttttcaattatccatgtatcagtgtttttgcttgagtgtatatctatgtagcacatgtatgcagtgcccatggaagccagaagagagcattggatcctgtggaactggaggtaccacgtaggtcctgggaattgaacctggatcctttggaagagtagccagtggtcttaactgctgagccatctctccagccccactccacccatctcaaagttgtcgtagttaggaaaacacctgagtttggtgattgggtgatttttatgttaccttaaaggtgagaaggaaatacaaatcaattaaaaaggtatgttcaaatttgagtttgtgaatatgaacgctcttgagaacagcagagaggtgggggacacatatgtgaaaggaggcatgcaggtcttccccctaggcttactgtgtaagcctgtaacctgtatataaggcgcctgaaaagcacttgatgttatcgttcgcatgccaaaaattcaaaaatcactgaatcgtttttaattgcgatttcagagctttgagagtgcattatgccgtgtgggccatgttgggctcgtgctttcagtgatccttttatcttagctttcagaagactcaccgcagtggagcctgcgtgtccaactcacttgtctattcttgctgctggagctgagagtgccttctaaactgtctagttttcaacttcaggaaggttcaaaacccatttaacaatattctttagcattatcacagaagtcacttccggtgttttagctgagtctgctagagcattttcatgtgacagggtccatgttctccttgcctcatagagtagggtaaatctgacttcatacaatagtttctgtttaacaagtaggtagattttttttccctgccaatatttgaggggaagattaaaatgagcgagagtacttgtgctttggccctacgcttccagtcagtcttgaagaatgcttagctaggttgggcttagcatccatgggaaggtcactgtgagaagtctgcagtgcctaagacagtgtcttaaggttttactgctctgaacagataccatgaccaaggcaactccttttcttaaaaaaaaattatttattttatgtatgtgagtacactgtcataccagaagagggcatcagattccattacagatggttgtgagccaccgtgtggttgctgggaattaaactcaggacctctggaaaagcagtcagtgctcttaaccactgagccatctctctagcccctgaccaacgcttataaggacaacatttaactagggctggcttacaggttcagaggttcagcccattatcaccaaggtgggaacatggtagcatccaggcaggcatggtgaagaggagctaaaagttctacatcctcctctgaaggctgctatcagagtactggcttccagggagctaggatgagggtcttaaagccacacccacagtgacatacctactccaacaagaccacacctactccagcagcaccataccttctaatagtgccactctcttgactgagcatatgtaaaccatcacagtctccaaacacagaaccccaccttgaagcagcaccaccttctgcttggatatcattcccaggttgaaaattgaccacagcagtgtggtgtttttatagagactaccctgtgggcacatttataatgaaagtcagaaaaagttgtcggaatcaggaaggctatgagcttggctatagagtgattttgagctaggtaataaaaagcaattgaaaacaacttttgtcatatatgattaaatgacattcagtttaatttttttaatatttttattaggtattttcttcatttacatttcaaatgctatcccaaaagtccctcataccctccccccccccactcccctacccacccactcccacttcttggcccgatattcagtttatttgaaaaggaacttaaaattctagttatttccttaaagattgttactatcatgagtggaagtgagtatggtttgtaattctcttaattaaagcagctattgagttttcttaaatgctcacctattataggactacatactgttcattttcctacagcctttagtaatgccttgaacatcaaagctgcattagttcggctgagtctgttatgcagtaacagaatctgaggtgggtttctccgcacttttcttcctttccttgtactgtctcttgtttttatgtcctcagaaggagaactagggtaactgaagcagccgagactgtgataggctgtctctgagttcatatccacgctccctttgttatgaggagggactgctgtatcctcttcagttccctctgacatggagggaagtttgtaagcctgctggagatgaaagtgacctctcctgttttcctttcagggcagggagaatgaagaagtaatgatttgaagaacgaggagaggctccccatatgagttttgactgagttcttccttcataccagctctaattttaaacggaactagacatttatgggactagttgttatatgcatttttcctgaatataattagatattctgtgcctgtcttctgtgcatgatatagcagtttacttctttaggcaagttaaaaatacgatttagaatcatctggaagccaattggcaggatataacattctctactgttgctctgtcttgggtatcgtcgggttggcacttttaacatttggatgacaaacgtgttaactgcagcacattttgttgaacgtgtgttattgtagtcctgcagcgtggcggagagtgtgatggggaaacagacagagaagcagaggggaatgagcatacgctggggagggagaggcagctagaggaaggcctggtgcgtcctgtgcttcgggggaacgcatgtttatctggatcagcctctggctgcagagcgggacagaatgatcctggagaggtcctttcagccaccattcagtgccacatgccagcaatggacactaaaaatggtaatgggtatgaatttagccaactaaggtagattgagagaatttatcttgagtctgaggcatgagcaagaaaagagaagacgagaaagtggtctgctaaatgtagatttttcagtgtaaactcagagccttcagtacagtagggaagtattctgtgatatcactagcatatgtagatttttttaaaattataaaatagtgaacattatttgttgaggtctttttccttcattcctagcttttatggcactggatgctggaattggaattaatgtcacactcctcacaaaagccttctataaaacctctgacatgcacactgcttacacgttcaagctgattggtcaatcacagttatggtataactgcagctgaaggagatggagacagtctctggttctgtgcttggcaaacccaactgttccttctaaatagtgttcccagaaacagggctctcttggcaagacgattcctgttcaggagaatgagaagaacactaagtggttgtcagtgaaggagaggaattgtgacctggagaggccatggaaagaaataccaaggtgttatgtcttcaaagagaaaaagtagtccccaaactctcaaacaagaggaaactcacttttgctggatgtattttaaagttttaattaaaatataactgtaccatcccctctcctaaaccttttttataccctcccaactcaacaaactcatgagacctcctactttttaggcattattattatatatacataaatggattaagtgtgtttctaaggatgaacacatggtgtcagataagtagccctgggacaagtccctgggaagactcattattatttcttagcagttgttaatcacttatagcttttcatgtaggagtgaggccccaccagatttcttccacctatattggcatgtcagctagtactggaattggacagaactcagtttactctcttttacaacatgtccactttgatctgtaaggctcaacccagttcagggagaccactattgcacaaagatgtcagggatgcctgattggtccttgtggcttccaagagaatgtctgtataaagcctgtctctatcaggaagttatggctatgccttccccagaatgttaacagagcacttccaacagtgtgagaaatagaagcacccaaaaaccatggttggcatgtgtcatcaattgcgtcctgcagctgttggctttgcttatggacatatctgatcagcttcacatctaagcaacttatgtgggagcaggcctccatcttggggttggaaatggttcttcttggcatttttgtaattgttcaatctgatattgcagcagtgggctctgggtaccaacttcctgagcatgggggcctcttaccacccctcagagcatgccatggttctttggtgtagaattactgtgttgtaatgctgaatctgagactaggcccaaaatgtggcagtccacgtagaccaatgatttgtttttttaactcatttttacagtgataggatcgacgggttagaaaaagcagctagaagctcctgagctggaattgaattgtggcgagaagccacctcatgcaagcagccgcctctgcatgggcggctcctctgaagcctgcagctagctcagccccctagcgctagtgacaaagcaaaaggcaacttctccaacttcctgtgtagtctcgactatgcctctgtgtgggatgaacattgtcccttttcttgggagaacaaaggggggggagtatctaacacctttaaaaaccacatagctgcactgtggtgaaagtgaggtcgtggcaggtggctagcctatgtagaagagagaaagtccctctaaagcgcgtctcccccggagcgtgttctttcttcacttctaatagcttttattttaatttctagttccgaatccaagcagctgccactctctttttaggcctctctgagagtcttgcagcgtaggaggcagtcgggctgtctaagaaacatcttttcaaaccaaccgcagtattgtttatcctgaatgaaatagaatttttaaggctgtcaagagtgactgatttgaagtgttttctttgataggcagaaagacgagcagatatcttgaaatggaaggtattatgccaatgtggccaattctgagttacttaggttgagcaacccgttgctgcctcattccccaccctctccctggcagctgttgaggaagaggagtgtctggggttggccttagctgcggtggcacttctggggcttgactccctactgtgagcctgcctatgaaggagtacagtgtcacctttggatgtttacatttttgcttttctttaagcctgttcaaatgactgttgttgcatcttggatctatgaatgttgtctaagcggcatagatcttttttatgtgtgaaatgtaattgtgatcatgattttatttttctctttggttcataataggaaccatagttatttaattctatttattatcttcttttaaaaaaaccaagatttatagacccttcttaaacttaaacatgtctgtagtttatggaggaatatggcacagagtgaggagaaagactgtaatggctaattatcagactgcttgacagatactgctaattatcagatacttgctaattatcatagttcttgacagattctgctcttaccccagtatttcctgagcttaggtattcctcacaacagactgcaggtagtgtgtatctctctgtgaaataaagaaattgggatgcagaggaggtgagttagctcttttagagccggcagctgttgtcgacaaggccaggactaccaggcggtctggctctggagcttcatcactgtgtgatgtgatgaacagtagcagaggcaaagcctcacgataacaatagaaatctttccaccccatccccacccaacaggatgactatggaagaaaaggaagacactatcctttgaaagaaacactgtttaaatacacaataatcatagaaagctaggagtgtgtatataaaacatgcaaacagttatgttaatagatgtgtgtgtgtatagaagtcttagctttcctttgcatttcatgcttcctgtgctgggtatcagcttaagattttaaagtagaaggaccaaaaggcagagccctggagtgaaggtggggtatctctgtaggcgtggccagctctctctgctcagcggttctctccttcccccttgcccttcaccactcttcacatttctcctgcatttggggtcactactactggagatccttgggtagcagagacttaagtttgtgtttaagtgaagctggactgaagtccctgattccccttgatgcattttgtggcttcagcaaatcccctttgtgcctaaagtgttttgccgtctatgatgtagtttttgcgaagcacgattgagttacaatgctgtagtggctgctctagaattttagcttctgttttccttgtgctctaatacatgcaatacatctgttggggtgctttcaaagaaagtgtgatttggtcttttgactgattttcatctatcaggctacctaggattgttggtggctaagtcctttgtgtgataattgctgggaattaacatttggtatgacagaaaagccaggagcagaggtgagcaggaagaggaacaggtgaagagctgggagtcttagcagccttgctgtcacacctgtgcttctcaacccatgagtctcgaccccttgatggaattgaacatcaaataatctgtatataagatatttacgccatcattcataagagtagcaattacagttgagaaatagtgatgaaataattttatggttgggtcgggggagtcatcacagcatgaggtgttaaagggtcatagcattagggaagttaaaaaccactggtctacactgtctcagtcggcctggagtttgtgttctgtgcacagtgctctcagtttcctgaagtgtcaaagcgctgtgcatcatgggagcctatgtgaggcttcactcagggcctatttccctttggtttccaaggataatgatacatggctgttgcatggattgtaatcataatgagaaatgctccactgtgcaggctagacggtttggtgactactcttgacaggactaacctttcttgcttctagttgagttgctgcagtcttccattgatctttacaagtggtagggatggtgagctacctgttaacttctgctgtagtttgataatggggtccagtttggttgttgttggtttttttttttttgtttgttttgttttgttttgttatggacttgattataatacagctgattccctcatcagcattccccagtgtgtttatttggcatgttttagctgcccgatagctttctcaggcaagtattgagattaactttttcctttgtttttgaagttttttaatcaaaatattacatcacttcccctccctctcctccttccagcccctcccacgtctgtctcatcccctgagagtaggaataaatacattaatcagtccacagcagccattctgccttttcaggccttgatactttagtttgcagccggcgagctgactttcctctgattccgtttgttttgaggagaggttcagaccgttaggcagtcttgttctgtatttttgggattagagcgtgggcgtcccctttcctagaggtgattttagatccagaaatggcattgccggttggaatgaacaccctcccgtagctgctgtcaccaagcctgtgtggctacgctttagtagagtttccatttgacttcccgtatttcttgagaaagagcatggaaagagcagtgtgtagtctcctgtgatagggtgtctctatgtgaagttgccgtgtaactaagagagaggtgagagggattggggttgggagggctggaagaaccttgggccttgcatgctaagcccgtgctgtgctggggcctgcatctccggctcctaccctgcttctgacacccggctccttgagcacctgggtcaaacgccttctgctttgtcctctgagtgtatgagaggacagatgtcagccatcacatcaggctgggcacaccccttccactgtctcacagttagctttgtttctgtcttgggcatctatctgtcagggctactttttttccacacgtccttcttctaacctaagatgtaaggatagtttcctgaataaaggagttttctgtcaatgttcatgggaataaagacttttgaagtaaagttggatttgagttttctagaaagataattgattcattcacatttaataatgtgtattataaaactgagttttccaaccaatttttaaaaatcaaaatgtctacttaaggaatgggatgtgtgtttgcatgcacttttccagataagggaagctaatttgtaaggtaacagagtttttctggtgtaggtgtgtgtgtttgcttgtttgtttgtttgtttctctgtatagccctggctctctgaaggccgagctggccttgaactcacagagatctgactgcctctgcctcctgaatgctgggggtaaaggcatgtggcactgccccctggctggtgtagggtttgatggaggtggaataaacatctgtcctcagagttctgaaagagaataattttaatttctgtctcgcttctaacggtttccttgtttagatcttgtgtgtttgcctctcttgacagcgcatcgcatcgtaagcgtcataaagaccgtatgccgcagttctccggccatttcagtctgatgaacatatgggcggctgtaagaggagcactagattttctctggttcgtaggtgttaattggattttggatctgctgcgctccttcccagccttgctgcctgcagctctctgctgggaactgctctttcctgtgtgcccttgcttccaggtagagggacccatgatgctctgacagcctgattctaggatgagcagtgagggggtctcctgactttgttgtacaaccaggaagggagcaacttggaagaaagcagtgtgtgtgtgtgtgtgtgtgtgtgtgtgtgtgtgtgtgtgtgtgtgtaagggtaatagacccatgtccctttcaaagcaatcgcaagctgcagcaatccagtctggagtcacaatcctttctcagaagtggagttgaggaatgtcccaccgtccacagaatttacacccagtaatctgagaccagccaatatgttggcctgctttcaggacctgggcttgagagtaaactctatgtgactcagccttacatgtccaaattacagtgcagaatttcaaactagactggtcgaggacagcagttgcaaggtgtcatttcctgtttgtcactagtctccatgggctttgtagtgactgctttgggatgtggcactgcctggcccacagtactttatgtgtcttttgtcctctgtcagtcctcaaactgcgttgttgctccccatcccactgctgtgttggctgaagtgccccatatgcacaggtttaactctgtgcgggcacctccacttttgctgctgagaatggcttttctttttctttctctttctctttcccttttttttctctttctctttcccttccttccttccttccttccttccttccttccttccttccttccttccttccttccttccttcctttcttttgttgttgttgttgttttgttttgttttttccgagacagggtttctctgtatagccctggctttcctgaaactcactttgtagaccaggctggtcttgaactcagaaatccacctgcctctgcctcccaagtgctgggattaaaggtgtgcaccaccacgcccggcttgagcatggcatttctatgtgagatataaagtattccttctggggaaggggaatgtacagtttgctgtgttatagtttatgccagtccacgtagcagcacgtactagttttggtaaaatttaccaacccagatcttacttaaacaacctagaagttatgtcaagacatggaaatgcgttcctgccagtaggcctcacagctcttcccatcaccctctatatgtcatgggtaacatttgagaggccactatggtgtggtagctgtttgtgagggactttcggaaccataggaaacgcaggctggcattatggcaggaggttggttctgccaaacccaaccggggaagtcacctagtttgtactgaagccagtttcaaaagtaaagtagttgatgttgatgttagaatccatgtctgcatgtctagaggaagttactagataccagctcatgtttttccattgatttctactgtgtagagactgtttttctcatcaagatttgtatatgaataagcaatggcaatagtatttgagggtagattttttacttatacagtagcttatattcgtacttacactatgtcaataatccatgttatgtgagtacattaagataaaggtgccaaccctgctccagtgaattctttgagactcttctttggctatcaatacttgggaagattatctgttggcataaaatgctcttatttcctaatattttaaaactattgttattttgggtttttttttttaactgtgccttacaaagtttagtattatcattgacttctaagtatttctttgtttgctttatagctttcttagtaactttatttagtttgctgacatgggaattataaagtacagcattttgttacaaagtgtccgttgtcttgcaattttcatctgctataagaagataatttacaactttttcttttgttatctgtggtgattggaatgaggactgcctctgtaagctaataagtttgaatgtttggtcccttcttggtagaattgtttggaaaggatcacaagttctcttttttcccttctccctaaccctcctccctccctctgtcttcctccctctccctccctctcaatgtgcgagcttccagctactgctccagtaccatgcatgcttgcctgccaagctgccttgctcctctccatgatggctagggaatcatcctctgaaactaaccaatgaagtgctttcttttataagttgccttggtcacaataatagaatagaatggtgattaagacaatattgaagacttcctggcattccttcaaaaatattttatgtgatattaaagagaatattatcctttatttgctgcaatctgtgtacgtgtatctgtggtagggtggtgacacaagggtgtgaatgtatccatgagaccactttgggcctgattgcaggtcttttttttcttcttgctacatgatggcgtctgagtggagcctgtcactgttgagctttcaggagctagtggttggctggttgaagcctcatctgtggttttatttctttctctgaccttgctctctatccctgataaatgaccttcatgtacctgctgccatttcctttcagggggtcctgattacctagtatatctatcctttcttactgtgttttcaatctcgtccttttcactgtaagcttgtttctttaagtcagcatattgcttgagtacagaaatgcacttggagagtcgctgtcttttaattgacaagtctaatccattttcatataattaccattatgtaacagtttctgccattgtatgttttccatttaatgcatttgatacatttttcttttttctgcccttttctttaagaaaacaagccagtgtccaccgtttctgagggtagtcttctgtcttgtttctaatgcaggtgtccttatctgagtcatggaaccttacttccctgttgagatcttaaactgtcacttgcttccacagtcagcacgacaaatagtctcagctttctctcattttcccctctttgctggtctttcctagtacttgcgtctggattgtttcggttactccctctccatttcctttattaatggcagaagtagactttactaatgctctgttgcttcccttgataaaatgttgaagcatttttctatgagaaaagcagaatagtactttcagggtcagccctttagggatttttaatgtccgaagatgtttttattacaacctcacattttaaatgatagaattctttttcctttgattctttgaaggcttgctggattctgttctgatctcagcactatttcgaattcttgtgttagactgacttttacatgatgtgttcttcatgtttgcataagttttcttctttgtatctggtatacacacacacgcacgcacgcacgcacacgcgtatatattggattttgatacacagtttctctgtgtaacagagccctggctgttatggactcactttgtagaccaggctggcctcgaattcatggagatcggcctgcctcagcatcccaagtgctaggattaaagatgtgcaccaccacaccctgcatatttgccattcttgaattatacagtggtgtcttgcatccatagtttttcttattctcccatttgctgtccttactgctttaagtgctttaagtatctcttcctcccagtttgtttcctctcccaggacctagatgttggtagttttacctgctgtgttgtctgtattgtgcatctctaaatcattgtcttctcgtcttttctgggcattctcactgtagtcactcctgcttagctgtgtcccattacctataaaatcaaggggaggttagttattttggctcatggtttcagaaggccgggcccttagttgattgccctgtccacctagacagatcataatgttggaggaaacctgcagcagaggacagctactgatatcacagggagccaggaagcaggaagtgagtcagagccccagttaggactgctaatcttccagctaggctctctctcctaacattctcagaacctccccagaatactgccactaggtggacaccaagttttcaaaactcacccgtgggagcatattctatattcaaagcataacactatcttaatctctcttttgttcttacaagttcaagttcgtaattctttgtgaaggaaggagggtgccttgatctcaagcatgcactagatccacgttctctctcccttctcctttgcgtttttttttccccctcgctggagctggtgattccaacagtttccctataggcttgccttagaaccaagcttggcacagctaatggaaaggtagatgttcaaatccagtgccttgggtgagtggatttaccgcagagttttgtttgaatgtagtgtggagggtttcatactgcactcccgagaagccacaggatctgagcactgtcaggtctgctgggcatgatgagtcctggaactgttagctcctggcctcagcagtcactgacccctgaatatgtcctttctgtctctgttgcacagagacaatggatgggtaaacgtgtgtgtgtgtgtgtgtgtgtgtgtgtagtactagctaattaaggctactcaaatcaacccttcagcgcagnnnnnnnnnnnnnnnnnnnnnnnnnnnnnnnnnnnnnnnnnnnnnnnnnnnnnnnnnnnnnnnnnnnnnnnnnnnnnnnnnnnnnnnnnnnnnnnnnnnnnnnnnnnnnnnnnnnnnnnnnnnnnnnnnnnnnnnnnnnnnnnnnnnnnnnnnnnnnnnnnnnnnnnnnnnnnnnnnnnnnnnnnnnnnnnnnnnnnnnnnnnnnnnnnnnnnnnnnnnnnnnnnnnnnnnnnnnnnnnnnnnnnnnnnnnnnnnnnnnnnnnnnnnnnnnnnnnnnnnnnnnnnnnnnnnnnnnnnnnnnnnnnnnnnnnnnnnnnnnnnnnnnnnnnnnnnnnnnnnnnnnnnnnnnnnnnnnnnnnnnnnnnnnnnnnnnnnnnnnnnnnnnnnnnnnnnnnnnnnnnnnnnnnnnnnnnnnnnnnnnnnnnnnnnnnnnnnnnnnnnnnnnnnnnnnnnnnnnnnnnnnnnnnnnnnnnnnnnnnnnnnnnnnnnnnnnnnnnnnnnnnnnnnnnnnnnnnnnnnnnnnnnnnnnnnnnnnnnnnnnnnnnnnnnnnnnnnnnnnnnnnnnnnnnnnnnnnnnnnnnnnnnnnnnnnnnnnnnnnnnnnnnnnnnnnnnnnnnnnnnnnnnnnnnnnnnnnnnnnnnnnnnnnnnnnnnnnnnnnnnnnnnnnnnnnnnnnnnnnnnnnnnnnnnnnnnnnnnnnnnnnnnnnnnnnnnnnnnnnnnnnnnnnnnnnnnnnnnnnnnnnnnnnnnnnnnnnnnnnnnnnnnnnnnnnnnnnnnnnnnnnnnnnnnnnnnnnnnnnnnnnnnnnnnnnnnnnnnnnnnnnnnnnnnnnnnnnnnnnnnnnnnnnnnnnnnnnnnnnnnnnnnnnnnnnnnnnnnnnnnnnnnnnnnnnnnnnnnnnnnnnnnnnnnnnnnnnnnnnnnnnnnnnnnnnnnnnnnnnnnnnnnnnnnnnncccccccttccctcccctccctcttgttcttacttggttactatttaagaatgaggaacatggaggcaccctgctcctgcagagaactcgttcccaacagttgcagatctgcagaggctttgtgggatctgtgtcgtgaccacatttgaggctgagtgaaggaagagctaagaagggactcgggggacagtctggtttctgtactattaggaaggagaggaaggcatggagggtgccatcagtgatggggtagcacagtgtaagtcctgctccttcacacacgcaagggggatgctgctgaggtgcagggaccagatggtgagtggagagaacagagcgctatcactggtacagaaagcaggaagaagagcctaccagagtattacagttagcctaagttactggctgcggtagaacttggtctagttttctgccagtctctgctttgttgattatgaaagtaaaagtattgttcacatgctcaagcagatgctcaaatcgctcctgggcctgtctcttggtgtgctggatagctttatgtccacttgacataggctgaagtcagtagagcagagaaaatacctctctaagatcagactgtaggcaaacctgtaggtagggtattttcttaattagtgattgacagcagggagggcgcagccctttgtggggggtgcagtccttgggctggtggtgctagggtctctaaggaagcagcctgagcaagccatggggagcaagccaataagcagcactcttccttggcctctgcatcttttcctgtctccgtgtttctggcctgcttgagatcctgttctgatttttctaatgatgcatttatgtggaagtataagtcaaatagaccctttcttcccctgcttgctttggtaatggtgtttcatcacagaggtagtaacttgcctagcaagtcttcaggactccagctcattcctcggtccctcaccaccaccaccaccaccaccaccaccgaattctactaactagtgaaatgcactttcctctggcacacctttctatctcagttttagtggaactgcgagtctcttttcttcacccttccttgtctttactgagttctgccgactgcagtgcctgaaagtctcctggattcaatctcaggatcacgttgctccctgcaatccctgcagtggcatctttgcagctgtaggtgaattcagatgccctagtgtggtcccgtttttgttttttgttttttctttttctgcctggcccccacactctagccaaatccaatgacttaacagctctgaaagctgccaggctctcacctgcctttcagctccgatgtttctcttcagagcctccaagtctggcagtaatttctccttattctgttgcatgtctcccacatgtcttccagccctcccactgtcaggttttaaaactcgttatttctgagtctcagagctccttgagagagtcccattatgcaaatgccaccttttgctctgtttattatcagctgtctcccatgttaaatgtgagcacctttgggctggggactgatgttttaactgttaagttttgtccatgatgtgcctggtgagtagtcagaagggcaggaaattagagatatttgtggtccggaagggatgcatcagatggagcaacttctagccagtcttctgagaatacattgaaaattttagatcccttattctctgctgagtcttggaggctcgtttcgtgtccatgctctttcttgtaacagagggcccatcgcgtttccccaagtctcttgattttgtctgggcaacacactgcttgtaaagagttaccaagcctgagacatggtttccaccctcaaaacatctatgatgggagttgggtggcagtcaaggttaggctgtgaaaccattgtgtggcagcaaaatgccaaactgatgctgctttcgttgagagaggagagtgtgcaaacaggtgttggcgagtatttggtggaggtcaggtttaggttgggtgttcctgttgccttggtgactgttcaaaacagaagtttgttagtatcatttttgttctttctattcacaggacacttgagagtggagggttgccttactaaaagaagtgagaggtgaaaatgatcagagccaggctggggctgggaccctgtggtagagagctcgcatggcatgttcgggacccaggttcagttcatagcaaatgaacaataagttgtctgcccctagttctcaattataaattaatcttgtaagaggtaaaagctcaggctttggaaatcactgaacacactagcttaggtgagaacttgataacgtacctacttgcaaacacaatgatctgactccatcccagaacacatattgaaagaacaacctgggcatgctggcatatgcttgtaattccaggacagaacaagcatagacaggtggatcccctggcttcctggccttccagcatagacttttttgtgcaatttcaggcccgtgagagatccagtctcacccagtctgagaacacctgctgtgggcctccatcttccacatacaaaaatattgacaggccacactactaggagaaattgtgaacagaagtttggggaatggctataagcctgactattgacgtacatgatggttgtgattcaggcttttcctgtttacagtgattttttgcccagtagacagactcattcctggacaggacggggagagggatgttacgggctggaaacatggagcgaggtgtcttcatttgatcagtctgcaaacattcctttccacccctgttattctcacctgagggctcagattgccactgtttggcagacaggaagacagttctcttaatagaatgtggttcagcacgctgaaagacagtttgtgctgtcagtctgcctggggaaaggatcagaggcgatgtaaatgagcttctgtatctggtggtaaaaacgccccaggcatgcttttaaagtaagacctctgctctcaggctcctcaaacctgcttctcaccacagctgtttccctggttggagggagtcaggagcaggctggtcccagaccctccacagccacttttgctgtgttaggcactgcccaggtggcaatgaataacactggaggaatggcagtctaggaatccttggcttctggaagccaggaaacccaactgcttgtgtccctctcactgctctgcaccaggagctgtggacctgggctcttgtagctgagttcacattggtagctgtcctgaaggccagctgtgctaaggatacttaactttgctgtagacagagccccgtcgagaagccaattaaggggtgaggtgaggagtttggtggacttacagtttgaagggatacacacagtcatcctggtggcatgaaacaccaggtggtaggagcccctcttaggttcaggtggggggagcccgccttagattcattgtatcccccatcagaaagtaaaacctcaagatcaggccccagccatctgtttcttccagcaaggctccccctcttaaatgttccataacctttcaagacagcttcaaacacacaaacgtatctgcaggagaaggaacttcacaaacaagccatagaaactctctcctcctctttctggtctgtgtgtagtccaggcgagcttgaactcactgtgtatggagcccagcttggatatctacatgaattctcagcctccaagcacctggagtgctgatgtagctgtgcagcaccacaccagccaagtttctctcagctctgtagagtggtggtagctcaggacacaaatgtgtgctcgctcgctcccttgcagaagagaactggagttgagcttgctaagcacaggaagcgccagtccttctttcaaagggaactccattcgaaaaagaattgaagctgtgttctgttggttttggttcacttgcctccaagttggccctaatgtccggactgagtttctccggttacatgtttgtgccgaagggctattgaaaaagtggcttagctaaaagtaaaaacaagcaatattctaggatttgtgtggatggcaggacaagactttgcaaggaggtgcagcccagggagaggacctgctcagtctagtgtgccccactttctctgcttggctctctgatgggttctctcggagctgtttccttcaactggccttcttgttacacgatgctaccaacttctgtaaacacactggaaatccaatgtctccccagacacctctgtccagtcagttatttctgatgcttactgccctaatctagcttttcctatctctttcctaagacacactcacttagccttagctctgagtcgggtcaggagtcagtaagatttattttcgtcattcacttttcaagacttacgttccaacagctagcttactcagggcccacgatttgtcttatgcttctttttgggaggaattgttgtttttctgagatggttttctgagagttgagttttcttccaaccttggcatttatgtgtaaactctgcacctcagacccaggatggggtactgtgtgggttcaggacacttgagcttttgttggctggggttgtagacctccatttgctgctggggtagcgttgggcaattgctatgacccatcaccaggaaaatcaaggccatgttagtactgtttccctagaactgcttcctctgcaagtcacctggggaagtcaatatttaataagttctttgggcagaaagggcagcgctcggcctggtgccattccagtgtgtttatagacaaacctggaatcatcatggaagtgagaaggccagctgagggaacagctgctttgggaagctcttttgtgcatgtgccatgttctacagaagctgataatatgtacaatggataataaacatagtttgttcgatggtataaatcacacacctcactaaggacccacatcttagttgtggcttgcattcatcccctgcagttactgcaggaccccgctcagcaccatcccttcggtgttcacgggcatgtgggaactccttcacgtctggaatgttgataaattggaccattagaagtcatatctaaggtagccgcttacgtcccttttcttacgcactcggtgtgaaggaatgcacagggacaggctctgatggctgtgtgctcctctggcctgtcctgactttgttagtggcttggatctgggatctttttaggcagagcatccattgtggctacataaaaggcacttgtttcccatacagtctgactggttattttcttttcttcactcttcatggggtatcatgtatgtgttagttggctttcctttactataataaacacctaggataagccagtttaaatgaagagaaggtttacattggttcacagttttagagtcttaaatcatgactttgtttttaggcttgggggtggtggtggcagcaatagagcacatgtggtagagatagctgctacctcttggctgccaagaaggcaggaagaaggggttaaggtccccttgcccccttaaggaccaggtaaacatttcagaaggttgtacttcttaaagtttctgcctcttttcagtagtgccattagctgggaaccaggctggtaactgatgggtctttgggaacattcaatatccacactataacagctctgagtctttgttttgttttgttttttttcaaacaacaaacaaacaaacaaagcaaatccacaggtgcacaccttccaaagtgtccacacgctcccgggctgaactggaaaggtgactttgaagataaagtgactgagttctttctttcttcttggttggtttgaacaccaatgccttttccctctaggtgacagtcccagccctctcaaggaggacccccccagcagcagtcaggactctctctccaccccatctcccacaacgtcagctgcccatgggcctcctggactagacggaaaccacctagcagcagacggagggaactgtggagatgccaccgccaccacgtaagttgctgtgctctggagcgctggtggaggaaggaaagacatcactgtttggccagtaacgacccaagacattaaatcccaggacacagcctaattggccagctgcccaagggaggtggccaggcaaaatctttgttgaacatgcctttctgtttcctggctggaaggggacgggtgtggcttccagagttcaggttgtggtagtttggggccgtgagaaggaagtgtccttccccctctcagcagagttcggcactagttctgcaaacacaggatgggggtgctcgcactcctatgggctgtctgtgaagactgacctagagttcaggtaagtgagtctttggttgttgctaggttcacattctgtttgacgtcatagcttcttgcctaatagagacttggatacctgacttcacctccttgtgtgtacatcatcagcaaatgatacaagcagaaaaccttgagcttctttgattacatggggtttttctcttccagtgctgatggcacctgagggatcatggtaggacaggggatactgaacctgcagagagcatctgagggctctgaggagacaaaacagatttattagtcaatcaaattacaaccaaaatatatttataattcacccaaagagcattaaaaatttctaaactaaaaattgcttaaaatagattatagataatgatgtcatctgaccctagctgggcattctggggctttaaatggattggaaagcgttcttcacattacttggctttttatagcctcagctggattcatatgaaatcattatgatcttattaagtattaagagaggctgggaggaatttggcatgctgaaattttgggatgacctttagatgtcaaaaagctgacctgaaatcagagtgaaactcccaagtttgcatattcattttctagaggtgtgtgtgtgtgtgtgtgtgtgtgtgtgtgtgtgtgtgtatgtgtgtatgtgtgtatatgcattggtgtgtgcaagaatgtgcatgtacaccccacccaagattgttttaattatctgtgctgaggattatgtatagtggcttcaatcatggctactgaaatatttttgtcacctttcttgtgtatcagcaataaaagtccctttggtgttgctgtggtacccagcgtctagtcctggctgcactagggttggagttagtctgtgagcttcttagtgaagtccagatccctatctccttcagtgaatgcagatctaagccagtgaagtcaactttagttagccactgctcttccatcgtggttctgcaggacagtgacatcatgcggcatggaacagccattgctcaactcactgcacattcaggcccaacacaaggacagcatgagaagtttgctcataaatcaaaggaagagtgaattccccagcttcctattcatgtacatttgaaaatgtcctgcgaagtactctgactttctagctggatgggggcggggttggagagcagaggaagcaagcgggaagggttgtgttgtaatcaaagtgcatcctactcagggtcttgagctgcttttcttcttatgctgtgcattaaatagatgtgggtgagagtccttccagtgtatgtgtgaaaggattgccttgggctggggagatcgctcagttggtaaaatattttctgtgtaagcgtgaggacctgaattcagtccccagaacccgcataaaaaagctaggcgctgcctgcatagacgggaagaagggaacgcagggcttgctggccaggcagctaggcgtaatcgtccagtgagagactcagcagacaaggaggaacaatacctaacttggttttcacaagtgtacatgtaggcatacctgcatgtattctctctctctctttctctctctctctctctctctctctctctctctctcacacacacacacacacacacacacacaggcacggacacacactttactggcttttatcagctcagattatctttgctacagataaatgcttctttctctctctcttttttaattagttatttatttcatttacatttccaatgctatcccaaaaagtcccccacaccctcccccacccactcttccacccacccactcccacttcttggccctggcgttcccctgtactgaggcatataagtttgcacaaccaatgggcctctctttccactgatggctgactaggccatcttctgatacatatgcagctagagacacgagctctgggaggtactggttagttcatattgttgttccacctatagggttgcagatccccccagctccttgggtactttctctagctcagtgagcatacttcagaaccaccttctactcccaaactggggtgtggctcaatggtagcatgtgctaagcaggctctgtttattttaagaaacattttttaatgcccactctcctgggccccatcccatggctatgatccagtgggccctagaagaaggtggaaagcttgtgttgctaacagactctaaggtgatgcttcatgagcagttacctgggtctctgggcctcttttcttgattccaacctggactgattgcatttttcttttcttaaatcccaactgtgctatcaccaaagtggttgccagtatgtagaatatgctcttctagctgggctgccttgtctggcctccgtgggagaggaggcacctagccttgcagagacttgaggtgctagggtgggggggatgcctgggaggcccttacctgactggaggagaagaggaggggaaaggccagggattgtgggagagcatgactaggagaggggcattgagctggatgtaaactaaataagtaaaaaatgaaaaaattaaattaaaaaggaataacaaatttagtgaatgaaagctctctctctccttctccctctcttacacacacacacacacacacacacacacacacacacacacacacaccaatcatttgattttaccaaggaagactcaagagccatatactggggtgaaaatctgctagctcagagaggcagaaaaagcgcccagctggtctttctgcactcctgacatcccagaaagaaaaagcagctcacggaccctcttttctctttaccttgtctttacggactgcaccttctctgcctcttgacctagggttgactttagctcttggattaaaaatttgtgctagggctgagccacaactcaactccttgtttacaataaacagaagctcttgggttaaaggtttatgctagggctgagccacaccacagcaaggttttccgttcataatcttggggttcacagtgtgatgtccctctgaggaataagattaaggtaagtgggctcttcctgttttgttaatatgtttttcgattgacacaaatggttgcctgtcattattgtgtgcagtaggtatttcagcgtgtctataacaggtataaggtcagtttagattattcgtgtgctcatcccctcatgcatctgtggtgcagggttccaaatagtctgcactgactcctctgacccctctgagatgtgcagctgaacagttaccctgccgtactacagacagaagttagtcctctcaggcatctgctctcttaacagtccttaatctttggccctcccccagcttctagtcacgtttttgtgtgaaatcatcaatttttagcatacttctattaatgagaatatgctgggtttgttttgttgtgttttttttaatggtccagaccaacatactccttggtctcccaaggacctgcgtgtgtctcctgcacacttagatttcctgctttagatagatctctgtatgtttgctcatagcccaacctgtcttcagcatctagcttaatcttcacctccaggatgcagagtctcaccatgcacccttctttcttgaacatctgatttgtcattaacacagtagtgcctcttgtttgtctttttgtttacatttacagtgcctcttgtttgtccttttgtttacatttacatttatttggtgtgtgtgtgtgtgtgtgtgtgtgtgtgtgtgtgtgtgtgatatttactctttaatttccctcactgataattatttccctataaaaagctcctttggaagaccccatttccgtctggatatcaccacatatctcttatgctattcagtctgatttctgtctatcctccttccttctggagaaagatgagaaccacttactgaggctttccaaggcattagtctgtgcttcctctttctagcatttttctttatatttgtaaatttggttcccagtgtcacttcctgtcttttgttcttacctccatttctacataccagatttgcagtaccaactatagtagtgaaatgagctgattcaagccagattagagtgtatgtaaacagtggtttgtaggaaaccactggaatgggtttactggtcccaaggaacaaggctagtgaagtcacaaaggggagagagacagaggagagtgggaagagaaatagcaaaaaaagaggggaaaaaagaggggagagatgaaaccatatgtattatctagagaagagcctctgggggaagggcagctcagcccctgggctggaaagttcagggttgggggcaggatatgccaggtagagactgagggatgctgggagaacctggaggccaggtctgctttggtatttaaaatatgcacctcagttgtttgtgtagggtctcagtacccacaagtaggctcttactaagctgatcaagtttcttttaaatcaaaatttctatggggtcattaaagcaacacaaagccttaagaaggtggtgctgcctggttttcaactaggatattgacagattttgaaggtccctttcagaactaatgcttatcccagttcctgaagaatgaaacccagctgcgtgtaggtcaggtagtgtttgcgacgctatacaaaaccaccctatctctgcagcgctatacagaaacgctgtatcctcagctacacagaaacacggcatcctcagactctgaaaggcaggttgacagaggagcacccacagcagctgtggttctgacctgggcagtgtgtaaatgcagctacagcctctggcaggtaggaagcaatgcggcagaatgcgatttctggggcttttgctgatgtgtatgactggtgggttattattcactgacgtcagtccatccaaagcgattacttacctggacacttggtgaggtgacagacaggtgacttcattgccagtgaagagttgctagcccaggctcctcggagttcgtgacatcataggtcaaggtatttcaaatgtcccaaagtcattctcccccatcccccaataaagtcattttccctcaactggttttcttctattgtaattgatggagctgggtccttgacaagtaatccttttaggctccctgcacagaagaaaaagtttttttaaagaaataccaggtattgctctctgctttctcactagtttgccaataagaaggcatggcctcatggtctgctctactccagatggctgtgtcccatgatgcctcttttcagcctgggtgtgttggcacctatggttcctctctgtcgaagtcggggtttctgttcctgcataccctacaaacctcccatatattacagagcccccataccctccagagtccctcccatgcctcacagaggcccccataccctacagagccccatagccaaacatcaggaccaagaagcaaatggggaggaaagggtttactcagcttacacttccacatagctgttcatcaccaaaggaagtcaggacaggaattcacacagggcaggaacttggaggcaggagccgatgcagaggccatggagggatgctgcttattggactacttcccctggcttgctgcacttgctttcttatagaacccaggactaccagcccagggatagtaccacccacaaggggcttggccttctccccttgatcactaattgagaaaattacagctggatctcacggaggcatttcctcaagggaggctcctttctccgtaataactccagcttgtgtcaagttgacacacaaaaccagccaggatactctcacctggggcatttgcaggtccccagagcaaaaatgtttcctgcgtgcctagacacttggttttggctgttgggaatagtaatacattctcaaaataatagtacatgcttttaactgttgagctttctctccagcacaccactgaaacgtagtttgattctttgagagtttcgtaccacgtattttgatcatacacacccctccccactacctcttgccagatccactctgcatttactacccacccaacaattatgtcctccttaaaacaacaaacaagcaaaaagccatgcagtccactttgtggtgctcatttattcttaggtgtgctgccatgcaccggactgtggttggtctaccaggggcagcatccttaaagcaaagcaagtctccttttcccaactgctaaaggtgctggcacttcagctgagggtgggatttcatactcacctttccctccatgctggggcattgtcttggctacatcttgtgtcttgcatcgccatcgaggggagctcacctgtacatttgccctgttgcgtccaggaagcaccatatctgtttagccatcctctgtctcttgttcttagagtcttcccactctctcctcatgatggttcctgagccttgtgaggggggagttgatttggggttttattagggctgagccttccaccggctcctgttctctgtaccttgacagggttcaatctgcccttttttattcttaacgggataataagctttctttaaatgaggcagactgaggttcctcaggggcgactacttggcatttcaaatctcttgaacagtcttattgaagatatgaaaatactctttagatgtgacgtatggtttcatacaccacaattcattgtagtaggtgcactggaagttcagagaaaagaatcatattttaataggcttctgaagaattggcacgtactgagaaatgacagaaatctttgtcttttctctctgtcctttgctggcctcttctgagtgcctgacttgactgtccactctttccttattcgtactttagtttgcttgatttcttgattgccccgttttatgcggtactgaagattcaccccatttacctggcacgttccaagaaactctctactgctgactaacagcctcagccccacctacatatacccagcccttcttagacctggataggcaagtgttcctagttggtactgtagtattttatcataaagttgtggttattgtttcaatagaaaatagatttctttttcacatttccattaatggtcacagttaagcattcattgatttttttgtttgtttgttttggtttggtttctttttgcaagaagggcaaggatgttatgtaagtttaaaaagatactaggcaagggtagtagtagtagctctcaaaagcaataagttgcccattttaagtgtccagcagcttttttgtctagggaggagataatttttttttcttttaaatgttggtcctggttatgaaaatctggtgctggcatggtgaagcctgatcaggtcaccccactgggtggattcagagagacaagtgtggaggagcaggcaggagcatctttctctgctctgaccctccctgcagcctttatgtctctgcttgctcagctcttttctgtacctccaggagctctgggatcagaagacattgagcctttttgctttagtgcaggctggtggctcagggctgtggaggcttccttagctaccctcctgctacccttaggaagccagggaggattacagtaagtggcctctgggttctgagtggttttgtaaatcatttcatctgaatgcttatatcagcgcagtgaggtaaagagagagtaggacacaaaacaagaaggctggcgcgtgactggtcagggatgtgagcacagccaatttctgtctcctgtgacttaggctgtctgtctaccccatttgctttactccagagtctgacctgtctagttgcttgtgggactctcaggcagtttgtgggtgtcagccctttaccaccaagattattaagacccagctgtcaatgcctgtggttggcagagagaccattgccgtggtaagccatgcggctgtggagtatgactacctgtggggcgacagccttgatccatctggtaggtgcacttactgtctagcacctcgactgagaagagactgccctgagtgagccaccatcccgaggagggccaagggactggaaacttggatgagtgagaaagaagcattgtagctcttttttttctttttttcttttttaatgaggaatgtgcaacttgtctcccattagttttagtgaagctcttaaagctaatcacagggcctatatgtgtggctatcaacaaaccataaatgtctacacagagaccttgggggccataacatgtcctgtatagttccttgctctggtggttttgataactctatcctgtgtgtgtgtgtgtgtgtgtgtgtgtgtgtgtgtgtgtgtgtgtgtgtgtgtgtgtgtgtgatgtctaactcacgcctttgtgctgtgctgtaagtgcacattctaaatcttgggaagtttgagttttaaattgttgtgttgaaaaatggggtagcgtttttttgctgcttgagactcccaagaatgagtacagtaaagtctagcctgactttggttttccttttgctttcattgtttctcattgctaaagatttctcttgctttgatgccattgttgtgatttattgttacttcctgcctctgagttggtgcactgtgacttcagagtaaacagtgtagaggcctcattagccatctctatcagcggggatacagcttaggaaaagcactgattgcagtcagccaggccttgctttgcatctctttcttcttccaaaggtcttagaaaagattatgtaagttattcaagcaaactgagcttagcaagattatccataaaaggcaaaggcaaacacctgcccctcctcactggcaagctttcaaggcaccacagttaataagcccagttgctgctctcctgggctttgcaggcagccacctgcctcattttgctaaccctgagaacccaacaggatcttcttaaacttggccccaactgcctgttctgttggttacataatctgcccaccaagcagcaacggagatgacctctgtagccatggagcagccctggatcttgcccttaggtggagttgttcagcagtcccagaggaccgagcctagcctcctccttaagcctttgatgtttgggaatctccgagaaaagtcacatggtgttacatggccaagacctgggaacccgagactcatctaccagttatttggtgcctaatgggtaatggcagttgtcacagtcagcttgatgatgaggcatttttctgtgtctatcctgagcttggttgtatgttcaggcctcccgttaggtagctgctattttctacagggaattgagctggtggaagcagtctcgtcagggaccctattggactgcagccctcagatctctaacggcctataattttctgaaaggaagtttcaattcctttctgttgtgctagcaagcttgtttgccctccatacctgactccacagaagtcattaggaaggaaggaaatggagtcattctctaagattggaccaaagctgtaaccctaagatgattctcttatggtgagaccaagagagcttgctctgggagtgaacctgatgggtccatgtgaggagatagttgtggcctttctcttaaagggggaggttcacgagggatgtccagcatcctccaggtatgactgtattccttaagactgcaggcatggatgctttctgtgctctttccccttctttgcctacacgttcgtgctgcagggtgagcaagttactgtgtttgcagttgactttaatttgattgtccagcaccctccttcagaagggcctgtgggaaagagcctcagagagcattagctgccccatagattgccctaggtgttcataggtcagattcagagtgcctacccaggcactctaggcttactggctctgtaaataaagttttattgcaacacagtcacacttagtcctttgtgatttgtctgtggcggctctttcttcacaaggatgccagagttgagtcaggtaagaagacgctggctttcaagtcccattttggaagaaggcaagtgggaatccctgtggtaaaccaatgttttcttgaagtcctgtttcagtacagagagttaccaccacagtggccatgtctgttggatgctgggtgttttctcggcataacctttatacatcgtttcttgccattgagcgaagcagaagttttcattctgggttttggatattgtagtatgcaactgtaatccagtatctgtatgtgtctttcataagattaaacttttattctgaaatagtttaatatctacagaaaagttataaaaatagaaccaaatcctcactccactgactttccctttttacacagaccgctaacaccctaaagacggaattagcatttatcctatacgtgccttggctttcggtgagaacagtgacaacatacagttgtttcaggagggtagtctggacaggaaatgtagcagcaagtagcaaggggtcagctgcttccccttacagtgctcctctctataccttccacctagtacatcatttaaactacactggtccagcctactgactgtcctctcttctttttctgagaaagcctgactcaggcacagatcaatgtaatgtgcccatgatgcatagcctctgggaatatacacccttgctcttccatcttgttcctgtcatccattgcaaatagaaaggggagtgtgtttaggggggtgaaaccacacacaagcccacggtcagcatggcagcatgagccttggcattcaggtctgtctgtggagcgagtgctgtcatgcatttggcatatgtgtgattactatcccttgtagctgtccttaccgttagcccagggtctgcctcctgagtcctcagagctcaggtcgctggcccttccttgtggtcttattccagcctctcagaacatgctctcctctgtctcacccagacatgaccttgagcaaatccctgccacctctctgggcttgtcttgcagcatgtgtcatgaaatgttagggtgatggagattgagccagcgaatgagctaacatagacaagctgggctgagcacacacacctcacagggcctgggtgtgaatgatgaggaagacgtggaagaaggcccctcattcccttcctccaggaagccttcctgatattcaagaggtgttcaatgcttccctctctgtccctgtgatagacctgggcagattgctccatggcaccagtcatggccaccctaaccccagccctgcctgaccgtttctggagaacaggcagtgttacattctcagtggtgtctccagggcagcccctgatgggttcttctttggccataagtaatgagtggacggggtctgttttggactcttcctaacagatgcaaaaaatactcctacctacgccatggattctggcaacctcatctcttgtccttgctgggagctcatttggagtgaaatagtttacttactgtagagccccacccccacccccgaacactaaggaatgactggcatttattttacagacatttctcataatctacacatctacattatttctattaacattttcaaacacttggatgggacagctgttcaggacttggactgtctatttcccatactacgagagattattgcactcatgtgtaagcttctacttagaggccttgcaagtgaggtggtgagaaccacgcactcccgagtagactttgagtttgattctaatgacgtgtagtaagcatctgagactacagggcgtagtcgcttctaataatttttgtgacaccgtttctctgctgtgagttttaagttgtttttgtcccccatcctggaactggccttccgttgccagcagtgctcaaagctgacccatctgctctgctgaagaaattctgtggcgttttctggggaccatttcaactgtaaaggctgcagccccttctcgccatttgggaatgcttgtgctcctctgatatgagaacctgttagcatgctggaggtacagcctccagtgatgaggtcagttgggcctacagtgccagtttgtttcacgttacagaattcaactctggaagtagacatactgatatgatagctagcaccattttgtgtgttatttgccactgggaaaatctctaggatctttgcctgatgtgcacacctgtttctctaaagcaagaatatttattctccctatacaagactctgactctctctctctctgtgtgtgtctgtgtgtgtgtgtgtgatctcttcctgcctttccctgactccaccaccatgtccaacctactcatagcaacgttggttgccccagggatggtgacatagacattcacaatgtgtgttctcaggaatacactcctgagtttgagatctccatgtgtcttttagtgaaacccttgtttctcctcgtctctttccgtgagaagggaaccgttcccttcatcggagggtgatggtatttactctctcttcctccataggaaaagctgcaggaagtgtgtcaactgcaaagtccttctctataattttccccgttttggtaaatgtggtgaaaccacaatgttgctttcaagaaacttgtgggacttaggtacctgatgtaatagaccaatccctagggtgagtggtctggccttgcccagcataggaggcaagaattagctataggagtgggaagagggcagcagagtttccagatttaaagttgacaggacttttcatttgatagagatagaacattcatctgatgctcaattactctcacgtcaccaatccttttcattatttaacccagagactcttagccaggttctcatgtgaaccatgaactacacaaaggtgactgggatggccattcctagagttcccagtgagggtggccaatcctagagttcctggtgagggtggccatttctagagtttccccatgataatatggctaagaatcatggagggtctaaagttttgttgtgtttgcatgcggttgaattagcctgccaggtaggtgcgtggatcctggcagaagatacaggagtcccagcccagagcccctgacagttagaacattagtacttcttgttccatgtctgcaggggtagagcagggaccaggcaatagctgtgaagtattggagaggactccgggtcctcaagaaacaggagtcttatttgatggatgaaaccggctctttgctccagagagttgcagtctctgctgtctccaagcccattttccctacaaatattcccaaaaacctagtccagaaccaaggtgtccagatgattggctgtgcagaggcataaagaggcccagggagaaggatttcccaccagatacatgggcagaactgcactagatgagagcagagatggttccattaggtacatgggagactcgggacccaggtgggacactgctgtgcctgccatcccagagaacctggtagctctccctcagagtgtgttaactgcacaaaacaaagttttattatgacagttcccacaatatataagatgtactccagctttgtttcctgtcagtactttctctcaccctgtctcccttcttctgtttctccaacagccccacggtttacttttccctcccccttcaagatggtttaaagaaaggggtgggaataacaggaattctcctgggagattttcttttctccactattttggagggaaagtaggtagggcatttgaaagaattaagtattaaaattgtaaggcatattacaataagtaattaactaaaatctgggtggttacataatgattacaatatctgtggttttaggagggtggttctttaaaaagctagccgatgaaggtgaattgtaccatgggccgtgcctggagtcctgtttgtgaacttgtggagtggagtggttttatttgcctgtttaatgccttacttcactctttctgagcggatagctttgcagcttctcttctgccatgcagatctcctctcatcaacgtttcctattctccaagagcctcaagctctttcctggacactgtttccagacttgcgttttgcagttatttatgagcctaacaacccacaaaaatctgagcctgtggaagtttaaatgagagcggcctgcatatgtgtgaacagtttaggaggaagagctgtttgggaagggctaggaggtatggccttgttgcaggaggtgtgtccctgaagggtggatttgaggtttcaaaagcccacaccaggtccagtctccttctctgtgtggggctccagtttgcagatcatgagcgcttagcttctgctccagctttatacctgcctgttgccatgcttcctgccatcgtgatcatgactcaccctgtgaaactttcagtaagccctcgattaaatgcttccttttgtaattcgcctcagtcatggtgtctcttcacagcaatagaacagcagctgatgcagtgtgcgtgtgtgctgtgggcctggaataagccaagaacacacatacagaaatttaagtaagagtgcactggctcaaattgaaaggctctcttggtaaacgaactagtgtgcgatagcatcgctcagtgatattgagcaaatacaggaagacagaaaacagcagccttgagaaactgaccctgaagagaaatcactcagtgagttccagatttgggacaagctgcaacaaacagtcctaagggacaggcttgtaccttccgtatctgttcttccagtagttctgtcactttctaaaatggaagggctactttctctttcacaaacacagagacaaaaggaaaatacaaagctacagatgtggggttatgtagataatagctatgtgagttatggccttcatctttacagggcccgttctcacagccatgctgtttgtcttcactgaagccgtcctccccgtccagtgatggatggccagccatcctttaatccatttgctccctatgtctaggcagatgtgaggggtgtggcacagtgtctcatcttcagccaccactaccacgatctccaggcaccttgaataattgccatgagattaaatagcaactgttgggctgtctgtggccttaaatcctctgcgagagccttactgtccacccttctcccttcctgattagtaagacaccattagagattcattttcttgtaaagaatttagtgtattttgtagttaggtggtccaggtcactaagatttatgttttttggctcagagtgaagcaggtgtttggactttccaagtgtccagatagaagttttgtaaataagttcttttaagaatactatttttagtgaaacagttattaagtacctatcagggcaattgtggagcgtgtcttgcatgtggtgtctgaagtccacttgggttatagcttttcctgggctgcacagatgctggggctgggctttgtatccctgggattctacctggcaggaaaggagagttatgaggagcagagcatagcccaaccaggaaggaggtggctaccagacagctgcgctctggcgtgactcacgcctgggacaaagagctgggtgaccatgttagcagtgtggcatagagcagagagggcccttctcctggtgaagggggaagagttgacaaaggggcagcctggaagctaggttgaagggaaatgagcaccgtgctcagaatgtggaggaaagctgctcaccgaagcaggtttgagctgagggcagtgatgatgatgaagaggactgtcaaggtgaacatgtgtgtggtggaaacagccgagttaaaggggctctgtgtctgtctgtctgtctgtctgtctgtctgtctctctctctctctctctctctctctctctctctctgtctctctctcttgtgtgtgtgtgtgtgtgtgtgtgtgtgtgtgtgtgtgtgaaagaggtggttagtgacccagtacttcctgagcaagtgcaaggtttcaacccagcatcatgaggaaaacaagaagatagaggtaaatgtactttccgtatgctggttagcagttgatgtgagagggactagcctactgcgtgctgtgctaccactgggcaagtggtcctgggctgtataaaaaagcaaggggagttagctgtggcaagcaagtcgtgagcagcttgagttcctgccctgatggaccttggtaacaaacccttcccgccccaagctgctttctatcagtggtgttcatcatagcagttaaaggcaaactctgggatgagcccttccaaagctccgagcgttcactcacctcttaatattttttgagattttgtttatttttgtttcttatatgtatgggtgtttggcctgctcgtgtatctgtgtactgcatgtgtgcctagggaagctagagaggagcatcggctccttgggacatgagtgacagacaactgtgagccactttgcaggtactgggaattgtattaaggtcccctggaggaacagctaagcctcttaaccacggaaccattttttttacactttaaattctaaggaatgacccaatcttctaaggaaaattgtttgtagttcattgacatgtcctttagactccagtcttttgttctttctgcaggaatcttgattgtctgtagcaaagttttctgaattcccacacgtaaatacctttcggccttgaagtactatgtgctggtctctgtcggccgcaggtcacgtgctcagtgtttaagcttgtgtgactttctctctgaggaggagaaatgggtaaaggcggctgcccctcacactaaggagactgtgaactcaatatggatcccatagaaacaagttctgagttttctcttgggttgctcataggtgatgctgttctcactcaaagctgtgcagcagcagtgtgatgtcatggtgtgtactctgtgctcctaaatatggtagattcggtcagtctcagtttatggtatttgcagctttgatccatccatttgttcatccaatctaaccctgttctcagccaaggctcacctgcttctgagaaaccatggcactatttggggagattagctttttttttaaagatttatttattattattattattattattattattattattattattattaagcacactgttgctgtcttcagactcaacagaagaggatgtcagatctctttatgggtggtcgtgagccaccatgtgggtgctgggatttgaactcagaacctccggaagagtaatcagtgctcgtacccgctgagccatctcaccagcccgggattagcttttctagctagtgaactgattgcttctggtaggtttctattgctatgataaaacaccacaacaataaggcaaccttgggaagcaagggttttacctcatctttcagatgtagcccagcatggaagggaagtcagggcaggaactcaaagcaggaagatggtgaggaaaagttgacaaaaaccagccaaagcctggtaatggtagtagtttagacagggtcaactgctccacaaacatggagaagttcagtaaagtgtctctagtttgagatgaagctgtttttgaagtggctcagggtgtagtcctgggaaggtacagagaactctacaccagtggattgaagaagcatgggagttggtgttctgaccacctggccttggaccattgtgtaattgttgttatgagtgttcatggtattaatcctgtcttttaaatgtatccttaggccaagccagacccggccatccatggtgcagtggctaaatatgcagtctccaaccacaccaagctccaacccagctggaacacctccttcacccagaatgtcaccgttccccctctctcctgctgcctccattgtagacaagctgcctgagtggtgcgtgcttagggaggtgatgtggaacgaggtggtggcacacgcaagggctgtgacatccctcttaggaaatgcttgccctggatcccttggtagtgacagccaagtttatatcagggctgtgcctcatctcagaagcaagtactcctgggtattgttggccttggttttatagatgccctacactcctccttcggtatatttgaaagcatctaggtacattttaatacctaataatgtagatgctgtgtaaacctttgctgtactgtattgttcaggaaagtcatgagaaggatgtctgagtacactgcaccatccagatgacttgtttttaatactttgaatcggtggctggttgagtctgtagatgtggacagtggaggtccttgaggacaatttgtagtggaagagcctggtgggaatctactctccctttctgatccttatccatttatgaaattagctactttggaagaactttttatatgcaaaggtaaagctcattttccactgaaaagggaggcggagtagatgctggccatggtcacgtccatagacatcttatgaccagtttgttgaagacagagaagcaagtcagtcaccctgggccttggctgacattttccttaccatcagggacttccttgtcttcaggaagatgtgatctttctttcttccttggctcagatctagccgagtatggcttctgtcttagtgagggtttctattcctgcacacatatcataaccaagaagcaagctgggggaggaaagggtttattcagcctacacttccacactgctgttcatcaccaaaggaagtcaggacaggaactcacacagggcaggaacttagacaaaggagtggacacagaagccatggaggaatgctgcttactgccttgcttcccttagcttgctcagcttgttttcttatagaacccaagactactagtccaccatgggctaggccctccctccttgatcactaattgagaaaatgccttatagctagatctcatggaggcgtttcctcaagggaggctcctttctctgtgataactccagcttgtgtcaagttgacacaggaaaccagccagtacagcttctatcattccctattgttgcgcctctctcgggagggctcggaacatgttcttactatttaggagaagctgggccttgtgtgcctttcaggggcgcagaaaggtctaaagacagagaaggcatggctggtccttccagagtgccgtggaactgcaggtgtcatatgtgggctccctgggaaactccctcccctccctttgcaaatgcacagctcaagtgctcacaagtaaacatgccttgtgtatcccacaatgctgagcagtgggaaaggacagcccacctggcagtgagggaaatctggtgaaggggcagcctccccaggaaggctccctaaggaaaagtttgcttcagaaacccatcatttccttgaaagccaagttctgggagggcctgatgttcatgtccgccattttctcttcagaaggtgttgccccactgtccgcatgtaaatgagactaggaaatggggaggagtctgtgaagcttctgtcatttagcgcttacttcgagccttctgtgttctctctgcagcgttatcaatcgaaaggctcgggcagtgtacccgtgtgaagcagaacacagctcggaattgtcatttgaaataggagccatttttgaggatggtaagtactgtcacgagctctgtgttgggggacatcatgtcttgcctgcacatagagtgccagccactggctgtggcccagttttgacaccagcttgtatagatggcttactcgtctgtagagctgaactccaggagctatgtgttggtggaaacagtgtttcttctttcttcttggctgtccccatcccttcatgtagggcttcattcgggtcatttctgatggtggcaccgagccggtagcacttgaagacagtgcttctgatgtgcatccttctgatatatgtccttggttctccttgacttccatcatccctcaccaagctcttaaatgcttcatgttatcagcaaagtgtagaattcagaatgctctgacttccctctctggcaccatccctgtgctttgcagttttctgccaactggaacagtgtgcgaatctttatagagtttgcattttaaataagggtgtggattatagttgaatgtttaatattcatacacagacatttaggagctatgcctgttttaatatttcacaaatttctcctctggttcagtgaatatattttcctctcttgctcttgatgtcttccctccctagtcacactcattatgaaattcatgggttgctgtggaaacggtgatgttgagtgtgggtggagctccccaaaagagttcctaggaagcagggaaaccttggatgctggaatggaatggctgattagccagaacttttggcttctgtggaacatatcgccacagtgcatgtggtagtcaggcgcacaggatttgctgagggttgttatatagcaagcaaattgtttcatttcagatagactctgtatgcggtgtgtgctcctagagccagataagatcacacaaaacagcagcagcaaccctcacacaagattgggctttgcggagaaattttggtgttggagtggaagcaagattttccaacatatcaccatgacatatgcacatacagttgtatcagaaggctgtggtcacacagccaccttgtcgtgtgttggaacagcacatgttgggagggacattatagcactgaaattgtaatgaattcttatattgtgtgacttacatgtgtgattccttgcattgtactgtctgagacagctacctccatcgatgattcgtaaggaagccctagactgtagatgcagctggctaagcccatcccacagtggttacacagtaagaccgtaagtgggtgttcaggttgctttaaatgttatcaagaccaaagtgttaccatgtttggtaaattttctcagctggtgactcgagtctttcactggtgtccttgtcagtgagaagtggccccagttccaggctacatataactctagcaaaggagatgtctcctctgtatttcttttatgagaaaacttttctagaacttacttctgagtttaactgcctttacatgcctttggtcaaaactgggtcaaatgttcactctccagttgtcactgggaggacttaggtcaatgagaaccatactgggtatacatgggcacatagccatgcatgacgcctgtgtctccctaaaccaactctggataaaaggcaaaagaaaggccagaagatagccaatacccaggaggcccaagttctccactgccaaagtcctttgatgacttttaggaatcatcctttaaagagtcataaagtatgtgtatactcatacataggtcagacagacagacacacacacacacacacacagagactcgtgcacaggtttatagtgccttgccctttgactttctctggaagctgtaagtgctctgtgcatcaggtttttcatcctagtctgcaaaggatgtattagcgagatatagaggacttctgaagcctgagctttgcttactattgccacttgggagacatgctcctcacggtatgctgcagatatggttgcatatagccaggttatatatcccttgagcatgatgcactgtagtgtgggtggccagctgtctagcatgttggctggaacacccagggcttctcaatagttcctcagtcccttccccaagactgtgtattccaaaacctcctgcttggtgtgctgattctctctctcgccagggtgtggatgcctcatctgtgagccctgcgtcttacaggtgcctccccaagtctctcattgtgacgcccatgagttcagtgggaagttttcagactgctactccctagggacaggccttaaagagcacagtaaattggagtgtcaatgcagggtacattctttccttactgtacacacttttatcttcagtgcagagtttatctcccatcttgtgaaaagcagatattagtcagaatgttactagagcccttcctcaaatggggtcttcccttctgacagccaacatgaaatgaaatagttggcaggttgtaggacctgtggagccaggcaatgctccagggagccactatttacagctcagtctgcaggcgtgtctccaaggaacacttttgctgtagaccaccgacacttaacatccctgagacccaaggctcttttcttgctctcatgcaatagcttggaatcttctagcaagaacagggatcctacagtgtaattcatttttataatgtaggcaagaacaaaccagtttatggcagtcagtggcctgaaatgaccccaggccttcactgttcctagttagggctttggaataatcacaaacaggaatctcagacaagcgaatggaagggaaagggacctttagtacgttagtgtgccagtctgtgacgcctcgcttgcttgnnnnnnnnnnnnnnnnnnnnctatttttcctcacttctcttttcaaatgtttaatttctttatttttttatatctatatcgattagtagtgaagttatacactgttaattactatgacagattgtaaaacttcaaataaaatatccaaaagtttatggtctcccccaaaagcaacttttcatcttttacaatgaaaatacattcaaagttagataataaaatatattactggtatgagaatatcaatgacttcaacagatagctaaaaacatgagaaaaagagtatttgagatgtaacttgatgccatatctggctactgtgatttctaacacaggtcacagaaatacaatgactagagttcaggagaacaaagatttcctgattcaactctttttgctttgctttgctttgctttgctttgctttgctttgctttgctttgctttgctttgctttgcttcgcttcccttcccttcccttcccttcccttcctttcccttcccttcccttcccttcccttcccttcccttcccttcccttcccttccttttaaaaaataattattatttattttatatatgtgagtacactgtagctgtcttcatgaacaccagaagaaggcatcagatcccattacagatggttgtgagccaccaggtggttgctgggaattgaaactcaggacctctggtagagtagtcagtgctcttaacccactgagccatctccagcctgctctttcttttcttactatcaggccatggacttggactacaaattccagttcttggctaaggatgtggttctataggtctgggggctgctgtgatgcactaccaaggtctgtgctgtgtgttctctgaaagctggaagaaatctgccccctttctctgtggcttaggaatcccagaaatacattctgttggtggatctgctagtcaggtatgaagtgtgggctcttctgtgtctgtgtctgctcacaggacataggactcatgcacacagggttttcaggaggccagagtccccatgtggtccggtgtattggttggtttccatgtgtagtgccaatattgctactgtttgttgcaacagctatggaccagattaattcttaaaatcctctagggattgaacactaaagggttcgagtagaataattcttgagatgctttttggcatcctctgggaggttgatggtatggggatatcaccacccatcagggccttccagatgtattctgaacgtaggaatctcagaaggctgtctagtgtctagtcatgtgcactacatgagcacatgcagtgtgtgtgatgctggctatctcagaaataagcaagttgacatatagacttgtgggaccaaggtgttttcattaaaagttgggaaggagacggaatgaaatcctcaagacacatcttgcatggggcctgtgttgtgctttcagagctgaaaccgagctctctgtgttctcttgtgccaaggccatttgtcatagatggagagtttacactctgtagaaagcagaggcccaacacttgatttctgctgtgcttacagctttgcagaaatgttactgnnnnnnnnnnnnnnnnnnnngttgtgaggcaccatgtggttgctgggaattgaactcaggcacctctggtagagtagtcagtgctcttaaccactgagccatctccagcctgctctttctcttcgtactatcagaccatggacttgggctacgaattccagttcttggctaaggatgtggttctataggtctgggggctgctgccatgcactaccacaaggtctgttctctgaaagctggaggaaatctgccccctttctctgaggcttaggaatcccagaaatacattctgttggtggatctgctagtcaggtatgaagtgtgggctcttctgtgtctgtgtctgctcacaggacataggactcatgcacacagggttttcaggaggccaaagtccccatgtggtccgatgtattggttggtttccatgtgtagtgccaatattgctactgtttgttgcaacatctatggaccagattaattcttaaaatcctctagggattgaacactaaagggttcgagtagaataattcttgagatgctttttggcatcctctgggaagttgatggtatggggatatcaccacccatcagggccttccagatgtattctgatcgtaggaatctcagaaggctgtctagtgtctagtgtctagtcatgtgcactacatgagcacatgcagtgtgtgtgatgctggctatctcagaaataagcaagttgacatatagacttgtgggaccaaggtgttttcattaagagttgggaaggagacggaatgaaatcctcaagacacattttgcatggggcctgtgttgcactttcagagctgaaaccgagctctctgtgttctcttgtgccaaggccatttgtcatggatggagagtttacactctgtagaaagcagaggcccaacacttgattctgctgtgcttgcagctttgcagaaatgttactggttccatggtcactgctgtggctagatggtaaagagttggacagcaaaagcatgggatatagcacttcacaccattccagcgctggagaggggagcacttcacaccattccagtgctggagaggggagcacttcacaccattccagtgctagagaggggagcacttcacaccattccagcactggagaagggagcaagggggaactaatcgttggtgagactgtagagaacgggggccctaggaaaagggatgggatagctctagaggataatactgtggctactcagaaagtaagtaatgaagtcatgtgagnnnnnnnnnnnnnnnnnnnncccaacacttgattctgctgtgcttgcagctttgcagaaatgttactggttccatggtcactgctgtggctagatggtaaagagttggacagcaaaagcatgggatatagcacttcacaccattccagcgctggagaggggagcacttcacaccattccagtgctggagaggggagcacttcacaccattccagtgctagagaggggagcacttcacaccattccagcactggagaagggagcaagggggaactaatcgttggtgagactgtagagaacgggggccctaggaaaagggatgggatagctctagaggataatactgtggctactcagaaagtaagtaatgaagtcatgtgagacccagcagtctggtctgagcgtacactcagaggaggggaggcaggggttctagtctctgtattcccacattgattatagcagcagcagcagcagcagcagtactcaaaaatagcccaaagatggaagcaaccacatgcccatcagcagtaagtggactgacaaaatgtggtgtgaacttagataggcgtgtaagcaagccatctccagaacaactgagcagtggttgtgactggacctgaggatctcctaagtgaaataggccagcaccgacaggacaaatggacgatcccattataggaaacaggcagatccttagataggaagctcaaggtcaccaagaaacttccatatagaagattgcccatagtgagtgacaggagatagagccactgtgtctcctgcctccaaaatggaagtacagctgccttcggccagctctttctgtctgcccgagcagctgcagtgtgggccctgacaacgctggccctgccctgagatgggaaaggcataagaaaatgaacagatatctctgaaggcatcagagatgagcctcagtgagctgtaaggcttcagcctgagtttatgctctcccaagacaccgtatcctgcaggggtcacatcctggggcatggctttgcaattggtccagtcctttctccatacattggttaccatggccactacaatgtatggatagaacctttaagaatagggctcttagtaacaaggtcagggtcaaggtcactgtggggatgaagaaatccagttgcctgctgggtcaccatgaaagcacaccttaaatcatttattgtacaagtgattatgtgtgagacactgggctaggtgccagggaacacaagttcttttatgtatgttctgcactttgagttgtagtctccccctggcctcttaggtgctcatggaatgtggaggcagcatgaggtccctcaactggtctttatgggggcaaagccgataaccgcagtgtgagtctgtgctgcccaggcatggttgcagtgtccaatatttaggacctagcgagcaaccaagtagaaaccttaaaacttgttggcaggtggaagacagttgtcagaaggcatggtgatagagagcagaattcacagaacttctcgcaacggggaaaacaaatggttgcctcagtaagaagaacagtcagaaggaaccatcagtgtactccaaacatgagcgggtcaagaaatgctcaggcacagttggcagtcagaaagctaggcacacgcggaaggaaacactgattcaccaggggtgtatgtatttctagtataaaataattccttttggttatgatcccaagctgcatttcacaactggttctgggttgttctgtagataaacacaatcccccatccccagtgtgtggctactacccctggccataatttgtgtttcagctagggtgccttaaatgctttggaatttgatatcaagatgccagtttgctagctcgagccccggatcctttgctgtccagtctgggccttgtcatgcgactatgccgagtatgtattgatagctatagtgtgctcaggtagtaggtaaggcccaggcctgccttcaggaactccctaaccagtgtgggagtgggatcagtgtgcctgattccggtagtgcttgatgggttgaagcaggcctccctcaagaggaagccattgtcctgactgaagcagaagagttacccagtgaagaagtgcaagggcattcnnnnnnnnnnnnnnnnnnnntcttctggatatatgcccaggagaggtattgctggatcctccggtagtactatatccagttttctgaggaaccgccagactgatctccagagtggttgtacaagcctgcaatcccaccaacaatggaggagtgttcctctttctccacatccacgccagcatctgctgtcacctgaatttttgatcttagccattctgactggtgtgaggtggaatctcatggacctgaggatctcttaagtgaaataggccagcaccgacaggacaaatggacggtcccattataggaaacaggcagatccttagataggaagctggaggtcaccaagaaacttccatatagaagattgcccatagtgagtgacaggagatagagccactgtgtctcctgcctccaaaatggaagtacagctgcctttggccagctctttctgtctgcccgagcagctgcagtgtgggccctgacaacgctggccctgacctgaggtgggaaaggcataagaaaatgaacagatatctctgaaggcatcagagatgagtctcagtgagctgtaaggcttcagcctgagtttatgctctcccaagacaccgtatcctgcaggggtcacatcctggggcatggctttgcaattggtccagtcctttctccatacattggttaccatggccactacaatgtatggatgaaatctttaagaatagggctcttagtaacaaggtcaggggcaaggtcactgtggggatgaagaaatccatttgcctgctgggtcaccatgaaagcacaccttaaatcatttattgtacaagtgattatgtgtgagacactgggctaggtaccagggaacacaagttcttttatgtatgttctgtactttgagttgtagtctcaccctggcctcttaggtactcatggaatgcggaggcagcatgaggtccctcatctggtctttatgggggcaaagccaataaccgcagtgtgagtctgtgctgcccaggcatggttggagtgtcgaatacttaggacctagcgagcaaccaagtagaaaccttaaaacttgttggcaggtggaagacagttgtcagaaggcatggtgatagagagcagaattcacagaacttctcgcaacagggaaaacaaatggtggcctcagtaagaagaacagtcagaatgaaccatcagtgtactccaaacatgagcgggtcaagaaatgctcaggcacagttggcagtcagaaagctaggcacacgcggaaggaaacactgcttcaccagaggtgtatgtgtgcgcctacgttcagtttctagtataaaataattccttttggttatgatcccaagctgcgtttcacagctggttctgggttgttctgtagatagacacaatcccccatccccaggtgtgtggctactacccctggccataatttgtgtttcagctagggtcccttaaatgctttggaatttgatatcaagatgccagtttgctagctcgagccccggatcctttgctgtccagtctggaccttgtcatgcgactatgccgagtatgtattgatagctatagtgtgctcaggtagtaggtaaggcccaggcctgccttcaggaactccctaaccagtgtgggagtgggatcagtgtgcctgattccggtagtgcttgatgggttgaagcatgcctccctcaagaggaagccattgtcctgactgaagcagaagagttacccagggaagaagtgcaagggcattctaggccgcaagtaaagtgctgcatgcgcagaggcctccagcggactcaggtacactggttgatagtgtagggaggggctgctggaatggtaggagaggccccatgcactgggccaattaacttggtttgaacttgaagtgggaaaggcgtgttctgctctgtttcctagagagttttttgagcaactcactacacagtgaactagaaggggcaagattggaaacaggtactagataaggaggtttttgagggccagaactagacagaacctttgtggcagctttggtgtttagtgccctagaagtcactgctccatgaagcctaccagaaaccctgtggcatggtgagtgtcaggggtaagcaccgggaacaggcttgtaaatgtggtctcttctttttcagttcagacctcaagggaacccggatggctggaagggaccctgaacggcaagcgagggctgattccacagaattatgtcaagctcctgtagctcccggccgtggggggtcctactgatcgtggcaccccaagcagcagcctggaaatggcacccaaacaccacggtcacgcttaggatctgcggttcaccatgggtactccagggtggggaggggatggaacagccacctaggactgtgcagatgtgggcggaagcagagcgtgactggcgttgctggagtcagttctcatctagcaggactgggcattgattgtgatgtttaattctcccacctgtggaacagagagagggcagacctcactgtccacacacccgctgtggggttttcagggggactgcgtgactctcgaaagtcccaacctggagggaagcagagagaaacttcttcaagcttgtgccttccttcctacnnnnnnnnnnnnnnnnnnnnctccccctccccaccccctccccgggcctgcccaccggcagctgcaccaagctcacctgtgtgcttcaacagccttttccaggtgctcacctgagtgctgtttgtcctttgtcaccttgttgccacaaggcccctctgtaaatgaaataaaatgtaatttactatttggtgtgtccggcctaatatggagagtgaatcaccgcagtgatgcttcacagtttgacagtcatggtcagcagaccatgatgttagtccttagaaccttgtgatttgcagcaggaaagacggtgggcctttctgagatgaaatcccagcattggagtgaagcagcaggggcctttcccacaagagaccttgggatgggaactggtctgtggtagtgaatgggtgagctatagttatgctgatgaccagccctcctgactggcttctttgggcagatctctctcataccactgagtatggctttgtcttccaggctcagcgttacctttgcccatcttgataaagctgggctttgggatgggtaggctgacagccatgccaacatgagattctctctcttccccagtctcctcagctcgaagtgcaaactccaggcccaggcatggcccagtcttatggggaagaaagctcggtatttgcagcctttggactatgaagggagttctgtatcactgagaactggggtgttgacatctaacccatataaggttcctgaccctgtctgaagtttctcccaaggaattatcaagagaaggatgttgtcttgcctcccctgactgactctggagcctgctgctttgttggttaacatctatggagtcacctcatggggctcttgtgtaagggcatcaagtttgaagttgctaagtttgcatatggaatgtcccccccaagacccctgtgttaaaggtcttgctccagcttatgtcactgtttgaagagggttgaatgtttaaaaagggacccttgtaggttttgggtcattgggttgtacctatcagagggtttatcggacactggtttcttcttttctcttttgcgtctgttgtttggtgaacagcttatcctaccataggcttcttgtcatgttctgccccaggtctgaagcccacccatggtgaaatgccacctccaggactgtgagtcaaataatcttcacaagttgatccctgggtgttttgttaaagtcccaggaagctgaatagcaggagttgcatgaggatgagaggaacgtgttttttagaaatatgtattctgcaaaagtaaggaccatttctttacagcaagttaaaataccaaaccataggtctcaggggaagagtggagaccaaggaagaacccagggctgcattggagcagctatcttgtgccctgagtggccagtctggccctggaggaaggtgccctgtgttctaaactgtcatttcctggtgtgactcagtgaaatgctggtagggaaggtgtgtatccaggcaagtctagtggcttagcatctagactgtggccatgcattgcttctcactggtatgattgaagcggacactagacacaactcatgatctgtttgctggcttgaggaagatttcccttgctcagagtgttgcatgccttcctctgtaccttagcattgtctccatgcttttgccctggcttcctaaaaagtatgaggttgaagtgtgtgaccgagcgcaaggtggcagtgaccgggctgctggttccttggttaggattgcttgcactttagttgtcagtgtcttctgtgtgccatgggatacgtgttgctgaataaattcgttttccatggccccaagagctggcagacctgtgtttatctagaggaaagcaggggagtggccgaggaaggtcaaggctgtttctaacagagtatggcccaggagccattggactcaacttgccatcaccacagggcagagcagagagcttagccctggacagggcccaggaatgtacacagttaaagggagctgggtttggttacacccggagatcagtcgggtgctttgcaaaataggtgtggctaatcctgggaacatctccaggatgcttctggcatgtgtgcttcactcaggacttgacaccagctgcatctctcacccaccagcaccagccacattactaggatgagaccttcagccttagttggttcagaggccctgcaggagtcttttttttttgcttgggtgaaatcaatgggaacctcagtgaatgtgcacagcaggtgagactgtagtgaatggagaggaggtagtctctggggccttgcggctcttagccactgacatggtttggatcttactggtctgtcaaggtcccttgtattagaggttggtccccagctgcgggcactgctggaaagtgaaggaccctttgacaagtggcacttcctcagcccaagcgagcactgaaggacaggatcctgtcatctctctttgcttcctggatggcatggagtaagcagctttgctttacatcatgccttctgcagtgatgtcaccctgtttcagtggcttccaaaccagagttggccagccacagactgagacctcggaacctgtgagcttaatcttttaaatgttgatcgtatcaactctgtcaacagggacagcactaatatgcatgctcctcactgccatctcatcttcaaaagccattggtggcctctgctcttcagccatcactgtgacctctaacccttcccaaggtctctttgcctctgcagtcccagcttgaccccatttcccacccacctcatgctcaatgcactctcatccttgatttctctcttaagtcagagccaggctttgtctactcctcgtgactcttcagccacacagcttttgcactcctgtctgaggatgctactgcaggggcaacctcagacagctttcctctccatccccagcaagtgtcatatcacatgaccgtcaattacttttccttggctttctgagcagtaatttactgctgccacatttggacaacgcagctcattttcccagtgccaagtgtttggctaaaagtgtctcagtccacctgctgggagaatatgcttgaatttttctatctatctaaagacaagctgagctgctgaccatccgacaggagacctgcatattgaacttggatagtggatgtgtatgggatgaagcggacagctcagggctacacactggtgcctggatctcttccttggagagttagttgctgtgaagatgctgcagagtgcagtgggaacagcttgcccagacccacctgaggctggcttgtgagggcatgaataacactccttaaagccacagaaataggattggttgaactggatgaaagttggacatcggtcttagtgacacacattctgcagtgtctgaatgactaagcgttctagtgacagtcgtttactggagccgtgtgtggggatgtggaaggcaaggcaaccttgggaaggaaaaggtgggatgaagagcgaggcgccacaggctgctacaactgctccaagaatcctgctctgccatacgaggcattggatctaagatggctcccggaacaccagtgagacagcaaaaaggaatcaaggccagggcggtgccctcttcccccatcttcatggaagtcctcacaggtgatgatgctcctttgctccttctgagttacctcatcagacagggttttctttggagaatggtgacaatgtggtgagatgtgattggctgaggatttaggggcttgggattggctcaagcactggatttaagcttatgcactcactgggcaatgaactcagatctgcaccctgacgctggtctccagagtccgatttcccgggattcaacatgtgactccatcccctctcacctccaaccccacccccaccatccttgatcctgctcccacaatcatgttcaacagtcctcccagctggactgtgggcttgagctggaactcagtcagtgggacaggaacaagtctgaagtattagccctttccataatgtctcatagcttgtgcaggatggtgagaggtgacaggtcacctagatagcaaagctatcatggaccaacagctgcaggctgagcacagatgcatggtccagcccagctcaggtaagccttgtcctaaccagcagtctcctggagcccgttcacagactggagagagactgaagaaatggtggactggtctgtcctgctacaattctgccatgtgtttcatttggctggtgccaagtgtcagggtcctagcttaatactcctctacttaatgctgtttgggacattctatttccagtgaagcagctgctctaagaactaggtagcttgggctcaaagtctcaggcacacctgtaatcatcttaatttgcaaacacttgcattacttatcaaaaggcaagctattgtgtgtgtgtgagagagagagagagagaaaatgtctcctctctgctgtagaggcactcagcatacacaagtagtaggccccttactctaactgtgacgcatggctccgtttttaatgtgtgacagtcagtagtagctagctgccctggaagctctcacctagcgattcataacgggaacttaaatttgtttggcctgagaattgctttgtgaaattcttaaaaggcactcaactcaattaagtctccttagttctgaaggcttgcctgcttttctaggagtttgtgcataggcttgcacatcaacatggcttttgtttcaaaatggagactaggaaaagctttgctccttaacagatcaggtttcttcaagttttacatacagatttgttttcacctacagatgttttgttcagctcaagtgattgtatacatgggtgcacacacagaatacagctcctcccctgggctatggtcagtggccacactatgtgttccagattttatctgttgtgcaacgttgaatttatctaccgcacaggcgtctctttctgaaagccagtcagcatcaaatgacatgttgcctgaatttatctgggaggaaatgtatcctgttttaaaaggaactggtaattgcatttttgtgggcccatgttcatgagagtcaggggaacaggaccataaagaatgggtagccatcagggtttgcaggtacctggaggagaaagcaagagcacgcagaggaagaactctgaattcagctggcatggtggtccacttaatttagtctcaaagtcttgtgggtgtggagactcatgggggcatgctgccatgggcgcacacggctacacgacaaccagcagtatagctctgttatggaagagtttaatgaactgaacatcatgatgacaaagacaaggttgaccatgtggcagcaaacatctttctatcctcagacaaaacttgggaggtcccagtgttggctgcaggcagaaatgcacgggatcagaatgtgggaaggcagaaagtccccggtgtccccctaggcatcctctaggcatccgaatgaaccagttccaggacaacaggtgattaaagtaaaggatttattgtaatctgcttacagtcctttgcaaagacagacatgtttttgcataaagatataaattgcttcattttaaactaatttagtgtttttaattatatgaagaagttttggtgaattatgaattgtaccaaaccgagatttttttaagagcaatatggtacaaaaataagagcagacagacagtttggcctgggacaggcattcaacagtgaattttagagaatatggctttgctgtttagttaagcagagttacctggagacacatgaggagccagtaacttcattaatacaaaaagctaatgcagaccttctccacttcaatcctggctaaggtggaattccagtttcttagagttaactcagctcctttcccccagaaacatctcgtctgcatgctgtgtgtgttcatggccttcaaagtgtggttttcatattgctgtgcatgtaagctgactgtgtttaaagacctataaattaaatcctccagattgcaaatgatgtaagaaagccccctccctctgagttcagcgtccctgggtctccccttgcagaaggcaggcgtcttttgaaagacaaggtaatgttgcctgcgtggtgaaccctgtgggaaactgctgaccccacgggggctttgtcccagccttctgcttcaccttttaggttttgggaattcatgatcactgagtactgatgagagtcatcatcatgtttgaaagattaatttggcctctattcaaagatcatttagtgcaatcatactgaagttccccagagatacacatgtctgtgatttggggcaagaaaaaagccataaattgcatcagtattggacagattaatgaattaaaattttagtgccactgtcttgcttatgtgattcatagtgtttttgtggtttttttcctccaaaactgtttatgtataaaattttcacttttaaaacctacctttaaaaaaatctaaaaaccttctagtgatctgtgggtctccattctgaccgactcatgcttagatggattgccccagtacctcctgccatgactgctgttcctgtgaccagctccaggagtgaaggaccctgtccaaggccagaggtgacttctgatctttgacagatgtggagggtgcatggaattttttttttcccccagaggagaaaatccgattttctggaatgggagaattgtgctctctgagctatgtttccagtctccccttccaagagcaagttctgcttcttgtagcaaagggggaaggacagcactctcaggaccttggtccaatgggccctgtcacctgtcaggagctgcagatgctgcagcagcatcccggatggaagcaggaagaagcagaagccagaactacgcgctggagtctcacgaacaccccacgcaggagaccaagaacaaaacaaatagtactgaaaaagtagaaaggcttagagacaaccaaagaggtttaagtgtggttatttacaacagagactgtaaaatggtaaattagatatgaagctaaaaaaaggcacagctttccctttcttaaatacactgtaaacggttcagtacgcatgcagggcatctcacttacaaaaaaaagttaccttgtttagacaaagatagtacttaaatagtctccagcaaaatagaattctttcaaaaatactttcccattcatcctattaaccattaaagatttttttttgtgtctcatttacaaaagttccttacaccttatttcaggtccttcacgatttatacatacagtaatgtacagcacagcaaaagactgcaaaaaattatttgtaaagccaacacaatagatactagaaatcgaaaccaaggcatttaacatcttatccattctaattaaataataaatggacactaacgagtgtgtatgccagcgatgcagaaaaacgtgcctggaaggccacagttccacgccacgtgttctgtttattacataccaggaatctgtatgtatttttgtgtatgctttttgtgtgtttttaaataacaaaagaatattaatgccccatattgactagacattttatgtgcaaaccaagggtaagctttaaaaagttctctagtcctttgaaccctttgaaaacaagcgagagataccagaaaccacatggcatagttaaaacttccatctgttaaaatatcaaaatcagagttattgactagatatggcttttcatccagaggaacgggaacatgttttctaagcactgggagtggagagggaagagtcccttagtcagctcaggcttgcctgatccaggtctcctggctttcccgactccacaccctcgatgggattttaaacttgagaaactgccgaccaactgtcaatccgccgtcacatgttaaaaatgtgatttcttgggtccttcgtagttgtagaacaacgtggggaaacttaaggcaaagttcttcctggccggcatcttccatcacttcctgtgaaagtaaaggggcttggcgttcccggattccacctttggcagctggtcgctgatgatctccaccagcatggcgggaaactccaccttcagagcctgggattctcggaaggtatagaagcagaattctagcaggtcattcaccaactgcaacacacagacacagtgggtatgacacagggcctcatctccagttccccgtctcctccatagcctaacccgattcgatgctcaggaagtgagcattgtcatagtctagtgtcacagtctaatcacattatctggggagaacaaacaagtacgttcttgtcatgtgtcatctagtatcttcatgctaaacaaattcagccaagggttacaactgtctagcatgaaacggatatccaaggcacatgtgacagaaataaagttaagagtgcccaggtaagtggcccctcagccaggtctcatttgccagcttgtgaactggttgagtctggaataagtacgtatgtgtgcaggcagcaggaccacgcatgcagaaaccctggagggttagaaacagaaaggtagtctcgctggaggtacgatgtctccatggctggccagtgggtctgaggcagccaccactttcacagggctcttccctgagctgaagaaaggctgaggctccctagctacactccagttctggctgattttgaaaaataaaagcctcgagttacaggttatctgtctagtgtgttgttcctaccccaggatactcctttctgggccacaaccactcccagttaggtaagttaagaaaacacaccaatgtattacagcattaatctgttaaagaacttaagtagagtgaagaaacatgtggagaggcagcatcctagctgatcagacaaaaggtgggttccaggacttcacagcagatcctctcacacagctcagttggaaggggacggagagcttggtgagcactcaggtttgctaacactttgttaacttagcaaatgctgcattattggacaatacaagctgggagaaagcatatgaaacatacaacggcacaactgctcaaaactccctgaggcttgggtcatccatttatcactaggaaataaatacgatcaaagtgaaactaaacataaggtcaaagtcagagatatgtcaacagaagaactgccttcaaaatgacccaacagtgacgcccagcactagctagctgtcttccccacaaaaggaccaagcatccgtgagaacatgaagctttgaaaggttcagggatctgggaggacagcacagaaagaggaggagaatattccgtcactggaccctcactggagcagaggcagtcccttctctatactgtgtgcatgtgggggactgtcccagcaaactattaggatgatactgataatccctacaactcaaacttcactattctgatgggcctggtggtaactaaccaaaattcctcccagtgattttgctttggaaaatgaatttactccactcaccattagccaggtacaggcagcagccatcttaaaatgaggtctactctgaatgtagtctgctttcatggtcataagccactgtatggaatcatctgaggccctaaacctgg

SEQ ID NO: 2111 - DNA, 2366 bp, Mus musculus
cagtcatggggctgcagcccctggagtttagcgactgctacctcgacagcccgtggttccgggagaggatccgcgcgcacgaagcggagctcgagaggaccaacaagttcatcaaagagctcatcaaagacggcaagaacctcatctctgccaccaaaagtctgtcagctgcccagaggaagttcgctcactcgctcagagacttcaagttcgagtttatcggcgatgctgagactgacgatgaacggtgcatagatgcctccttacgggaattttctaactttctgaagaatctggaagaacagagagaaatcatggcattaagtgtgactgaaaccctgattaaacccttggagaaattcagaaaagagcagcttggagctgtaaaggaagaaaaaaagaagtttgacaaagagacggaaaagaattacagtctcatcgacaagcacttgacgctgtctgccaggaagaaggactcacacttgcaggaggccgacctccaagtggagcagaaccggcagcatttctacgagctctcgcttgaatatgtgtgcaagctccaggaaatccaagaaagaaagaagttcgagtttgtggagcctatgctgtccttctttcagggaatgttcactttctatcatcaaggccacgagctttccaaagacttcaatcactacaagatggaactacaaatcaacattcagaatacacggaatcgatttgagggaaccagatcagaagtggaggaacttatgaataaaattagacaaaatcccaaggaccagaagcgagccagccagttcacagcagaaggctacctgtacgtccaggagaaaaggcctgctccatttgggtccagttgggtcaaacactactgcatgtaccggaaaacagccaagaaattcaacatgattccatttgagcacagatctggggggaaactgggggatggcgaggctttctttttgaaagaatgcaccaaaaggcacatggactccacggacagaaggttttgctttgacatcgaagctgctgacaggcctggcgtccccttgaccgtgcaggcgttttcagaagaagagaggaagcagtggttggaagctctgggtggaaaagaagctctgttccacacgtttaacagagccattgtcccgagaccggaaggaggtgcacagctggataagatgggattcacaattctcagaaaatgcatcagcgccgttgaaacccgaggtataaatgaccaaggactgtacagagttgtgggggtgagttcaaaggtccagagacttctgagtatgttgatggatgtaaaaatgtgcaatgagctggacctggagaattctgcagattgggaagtgaagacagtaacaagtgccttgaagcagtatctgaggagtcttccagagcctctcatgacctatgagttacacagagacttcattgttccagccaagagcggcagcccggaatcccgagttaatgccatccacttcttggtacacaaactgccagagaagaataaggagatgttggatatcttggtgaagcatctaaccaacgtgtcaagtcactcgaagcagaatctaatgacagtggcgaatttaggggtggtgtttggaccaactctgatgagaccacaggaagagactgttgccgccatcatggatttgaagtttcagaatatcgttgtagaaatcttaattgaaaaccatgaaaagatttttcgaacctcgcctgataccacatttgctgagcccacatgcctgtcagcatcacccccaaacgctccaccacgacagtccaagagacaagggcagaggacgaagagaccagtggccgtgtacaacctttgtcttgagctggaggagggtgacagtcccagccctctcaaggaggacccccccagcagcagtcaggactctctctccaccccatctcccacaacgtcagctgcccatgggcctcctggactagacggaaaccacctagcagcagacggagggaactgtggagatgccaccgccaccacgccaagccagacccggccatccatggtgcagtggctaaatatgcagtctccaaccacaccaagctccaacccagctggaacacctccttcacccagaatgtcaccgttccccctctctcctgctgcctccattgtagacaagctgcctgagtgcgttatcaatcgaaaggctcgggcagtgtacccgtgtgaagcagaacacagctcggaattgtcatttgaaataggagccatttttgaggatgttcagacctcaagggaacccggatggctggaagggaccctgaacggcaagcgagggctgattccacagaattatgtcaagctcctgtag

SEQ ID NO: 2112 - protein, 780 aa, Mus musculus
MGLQPLEFSDCYLDSPWFRERIRAHEAELERTNKFIKELIKDGKNLISATKSLSAAQRKFAHSLRDFKFEFIGDAETDDERCIDASLREFSNFLKNLEEQREIMALSVTETLIKPLEKFRKEQLGAVKEEKKKFDKETEKNYSLIDKHLTLSARKKDSHLQEADLQVEQNRQHFYELSLEYVCKLQEIQERKKFEFVEPMLSFFQGMFTFYHQGHELSKDFNHYKMELQINIQNTRNRFEGTRSEVEELMNKIRQNPKDQKRASQFTAEGYLYVQEKRPAPFGSSWVKHYCMYRKTAKKFNMIPFEHRSGGKLGDGEAFFLKECTKRHMDSTDRRFCFDIEAADRPGVPLTVQAFSEEERKQWLEALGGKEALFHTFNRAIVPRPEGGAQLDKMGFTILRKCISAVETRGINDQGRVVGVSSKVQRLLSMLMDVKMCNELDLENSADWEVKTVTSALKQYLRSLPEPLMTYELHRDFIVPAKSGSPESRVNAIHFLVHKLPEKNKEMLDILVKHLTNVSSHSKQNLMTVANLGVVFGPTLMRPQEETVAAIMDLKFQNIVVEILIENHEKIFRTSPDTTFAEPTCLSDPNAPPRQSKRQGQRTKRPVAVYNLCLELEEGDSPSPLKEDPPSSSQDSLSTPSPTTSAAHGPPGLDGNHLAADGGNCGDATATTPSQWSMVQWLNMQSPTTPSSNPAGTPPSPRMSPFPLSPAASIVDKLPECVINRKARAVYPCEAEHSSELSFEIGAIFEDVQTSREPGWLEGTLNGKRGLIPQNYVKLL

SEQ ID NO: 2113 - DNA, 360697 bp, Homo sapiens
tcagattatccacgtgttaaagtgagaactctgttcactgcacatgtgtctcacgctactactagatgtcactactagatgagaccatggtaggagttaaaaacagaatgacggtccagcaaacccatcctggcctcttttttcttttctttttatttttttttgagacagagtctcactctgtcacccaggctggagtgcagtggtgcaatctcagctcactgcaacttccacctcctggattcaagcaattctcctgcctcagcctcccaagtagttgggattacaagtacccaccaccatgcctggctatttttctatttttaatagagatggggttttgccatgttggccaggctggtgttgaactcctgatctcaagtaatctgcccaccttggcctcccaaagtgctgggattacaggcatgagccactatgcccgacctctttttaaaagcttctatgcattatttgtagtagaaccccatttaaaaatgagaaatccaggccaggtgtggtggctcatgcctgtaatctcagcactttgggaggctgaggcaggaagatcacttgggcccagcagttcaaggctgcagtgaactatggttatgccatgatactccagcctgggcaacagagggagaccttgtctcttaaaacaaacaaacaaacaaacaaacaaacaaacacacaaaatccaggggaaacaggccaaacgaagcgcatgccaggacaataggtataaagcagaccagttccaaacaaaagaggatttaaggtcatgctacttagaactaaataatctaagatgataacttaatgacttgtttctccagtgtgtgccatgaaccaccaggttccccttttagaatataaatgggagtgttctgttttctgttcaatctcagccagataatcgattctaaacaccccatgacttccctgaaggtctgtttccttctactaccaatctaggagtctactaatctctggttgcaaggaagaaacactgattctgtcaacttaagcaaaagggtatttgatttgaagcatacggaggtgttaaggaagtcttaaagaaccagctttggaagaagcctggtagcctccccagcagcaggtctatttcaacactcctggctggaaaagatgaactctgtttcttctgtcagtgctttactacgttcaaaagtcaaagtcttgggaaagtctggttggccaagcttaggtcacgtgcccagcccttggctgtggcaggtctgagaggaaagatttatagaacaaacctctagggatctctctggattccctagcatgaggcaggcacaggaattttacaaagactacatgttatgtgggaaaatgattaccccggtggaaatcatggtaaagttgggaagtgggaatgaatgctgggcattccgaaatgccagtgtccattatttagagtaaaaacgatcattttaatggcatcaaagcacataaacccaggattcctattgaattaatatatgctgatttattttactattttctaattgttaagtggctgctgcattctttttttctttactgcaacaaatagccttaagcatataattttttttttttttttttttttttgagatggagtcttgctctgttgcccagactggagtgcagtggcacgatctcggctcactgcaacctctgcctccagggttcaagtgattctcctacctcagcttcccaaatagctgggaatacaggcgtccaccaccacacccagctaatttttgtatttttagtagagagggggttgcaccatgtttgccaggctggtctcaaactgctgacctcctgatcctcccacctctgcctcccaaagtgctgggattataggtgtgagccaccacgcctggcctttttcttttttaagtttttatttatttatttatttattttttgggatggagtcttactctgtcacccaggctggagtgcaatggtgcgatctcggctcactgcaacctccgcctccagggttcaagtgattctcttgcctcagcctcccaagtagctgggattacaggcacccaccaccacgcccagctaattttgtatttttagtagagatggggtttctccatgtgtgtcaggctggtctcgaactcctgagctcaggtgatctgcccgcctcagccttgcgaagtgttgagattacaggcgtaagccactgcacccagctgagaagatatgaatttcaatgtgggaggactggagaatctcccccacatacccaccctccctcttccccatcccagtttcagtaggaacgcccacttctcaaccaggctgtcaggctggctggaggaagcagcagtgtgctttgttttagaattatcctcttgtcagcttattctgcatggctagagtatatcagattgtaaacgcttgagttgagggactttttcgccttagcacttgcttaccacagtgctttccccaccccgtgtactcaatcaatatttgctgaccaaatatccctagttaattgtactagttctaaaacttccttgaggtcctaaactcttccaagctttgatgcccagaagtactggaaaaggtgagctctcctgagaaaaaaagcagcgaagcccgaagcccacgctcagtgttctcaaggatagaagcagggctggtgctgagcaggtaggatgggccctcactccctcttcagcctcatctcagcccgtgctgctcccgccacatggccacagtttcagctacttgtactggttcttccacaaatcctcctctgggaacgcttcttccctctgcacatcacatccacttcacctctgtccattcactcttggtgcttcaggtctcagctcagttgtcacatcctcactgacatctcagaatagtccaaagtcccctgaagagcaggcttcttcctagtgcttaccagagatttcacttgacatttatatttgcaatgttttgatatattttctttcactctgattggaggatattagtccatgagatcatgaatcatgctaggtttttgtttgtttgtttgtttttgctattgctgtcccagttctaggatagtacctggcacataatgggtgcttagtaaatgctggaggcacaagtagtagtttcttttttttttttcttcatgtctgttttttttttttggagatggagtcttgctctgtcacccagtctggagtatagtggccacgatctcggctcactgcaacctctgcctcccaggttcaagcaattctcctgcctcagcctcccaagcagctgggactacaggcgcatgccaccacactcagctaatttctgcatttttagtagagacggggtttcaccatattggccaggctggtcttgaactcctgacctcgtgatccacccgcctcagcctcccaaagtgctgggattataggcaagagccaccacgcccagcacaagtagtagtttctgcacaccacactgcactggtgcacccactgcaatcctggaatatacagagatcctggggtgactctcagcagagcatacccagcttagtgttcatagcatagcctttctcaaatttcattactcagactgctagtcacaaactctcaatagaggtggtatgaagaaaaaggttcttttaaaaatataggtgtaattaaaatgtcaaacatatttggaccattattattattctgtgagaccatatgtctttaaggaaagggtatggctgggtgcagtgactcacgcctgtaatcccagcactttgggaggtagaggcgggtggatcacctgaggtcaggagttcaagaccagcctggccaacatagtgaaaccccgtctctactaaaaatacaaaaattagccgagcatgatggcgcatgcctgtaatcccagctacttggtaggctgaggcggaaaaatcacttgaccccggaagggaggcgagggttgcagtgagccaagatagcgccacggcactctagcctgggtgacagacagagactccatctcaaaaaaaaaaaaaaaaaaaaaagaaaaggttattataggaagacgagtgacataaagggggagatgaaggagtcctttactcttccttcattatgctttctttctaagcgtgcagttcagtggcattaagtatattcacattgttgtacaagcatcaccattatacttttataggttaccagttcacaaactcgttgtgtagtatcctcatatcttgttggatcagcctgccccatgctcaaaggtgaccccttaatggcccaagctacttggcattacccccttcttgggctcagtgatcaattgagcggcaggcctccaggtccaagggactcagggaatggcagtctcctgaaatgctttgattcccagattaaagtagttgtgataagggagcaactttctagctcaggaaggggtattgtctcacctgtaggtgagtctggaaatgttgatgctatttggttctcatgaaggaagctttctggaggctgaagtcaattcctagaaggcaagcagagccaagagaatcatagagaaatggagctggagtgctgataactgcttcagaagcttcaactacctcgctgtggaggttttcagtgatgtgtttcaataattaagctattttggcatttttgtttctttttgtgttttgtttttaatacttgtgagagaaagcagctttacacagtctgcaagagacccaaataattattttaaatttcttctatttacataatttagtttttggcatagctgtaatttatatacctcactcacaaaggtgtcagcctgcagcagagactgctaggttcctgctcaaaatctactatcccttttctctttgtaggaaaattcacatttcacttatgtacccgggaaaaagaccacatttttcatcttcccttgcagtgaggtgtggccatttgattaagatctggtcaatgagataaaaaataaaatgttgtgtgagatgcacaggaatgctgagaaaagaagctgattcagtgaggacaggggcccttctatcctttcccttctttcctcccagaaggacctctaggagccatcttgtaccatgaggtgacattgaggatggaagccagtgcttccttggggactctggaatcatggactcctttttatgagagagagggaaatctaaaccccttatggtttaaaaaccagtgattttggattttctgttataatgtgtctgaacctaattctgactcacaacctgaaacatatccaaggattcagtagacccatatttaactttacaggtaggtactttgtgagtcatcacaacacaaaaactacagtatggtatgcagcagaacctacatcaagggaaggtttcctatctgttaacctctatttcatgtagactgaaacttgaccagcttgcattgattcaaatccctaactaatccaagcactgagtaaagcataaaaatgccatttgggtgtcagtgcctacatgacttaagtacttgaatgtctcccaggcatctcaaacatttcatgagtttatactgaaacgcatccttccaacccagtcatcaccaacactgccatgacagcttcttacctcatgttatcctttcagtaagtggcatatccatccacctaacttaccatgccacaagcctgggggccaccgctgaccccttcttcctcatttccaatatccaggctattgtcaagtcccagaatctccttctaaaatatacttcatttctgtctatttctcgctgtttccttggagggtcaccttggaggattgagctattccatttcttgcccagacaactccaaccaccttctgtctggatttccattctccacacagcagctagagagaaaacacaatccggatcattttactacatgcataaaactctttaaaggctcccaacagtgttgggatacagtcccaaatcctaaataagacttagaggctctgcaccatctgaccctgcctatcctccaccacctggcatagttgtgagccagtctctctcactgggcttcagccaccgacctgttcatctcttgagtgtgccatctcaggggcctgcacaagctggtcccatgtctgtactactctgttcctacccctatttaacagttaactcctactgatattcctggtcattgattaaattatcattttcatatcacttcctcaatgaggccttccttgacccagccccaatctccatcaggtgttccaattataatctctcacacacccttcactttaactgcatggtgcttcaattttcaattggatatatatgtgtgtgatttttctttttctttttttttgggatgaggccagtctcccccagagaccaaaagcacggtgaggactgttttgtgtgctgctgcatcatgagcacctaatacggtgcctaatacatataaatgatcagtaaatatttgtgggaataattgattaattaagatgaaacctggaaactcagtagcatctgcttttgtggccacttttcttgagttctgtcttacatggtttaaaaccatgatttaagggctctcctgccccgaaaatctttcccacattgatggaatgtaatctgtctcctcctctccctcatccctctcttcagcccatcctccacacttccttcttccttgagtctcattattatcataattttcagcaggcactttacaaacacaatttcattaaatcttctcaagcaacctgcagctgcaatgtcatcatctccatttcactgatggtaagtctgaggtttacagaaaattacctttgctaaggttgcacaactgttaagtagtaaagctggagctggaactactaaatatctatctttccactgtccactgtacagagatttctcttcagttagttatacttattcattccacatttactgatcacttgtataccagacactgcataggcatagctgaataaaacaaaattaatcaggcccctccactcatggtaattattgtggacctatttggtaatgaattaagattcatattcactagctctttaacactgggtgtacatgtgtgtgaagtgataagtaatattttttatgatgttttgacattgttttaaacaacttttttttttctccaaatatctaaagaactgggcacactgaataaaccagagtttttacggcttgaagtctaatgtggtaaaggagaagcagttctagagtagttcatcttaaaaaaaattttttattgagatatatttcacagaccaaaagaaatccacccatttatcacatacaattaagtgattttgagtatattcagaattgtgcaaccattaccaaaatgtaaatttaaattgttttcggccaggctcggcggctcactcccataactccagcaatttgggagaccaaggtgggagcatcatttgaactaaggagtttgagaaaagcctgggcaacatagtgagaccctatctctatgaaaaataaaaatattaataattttcatcaccctgaaaataaactcctgactacatataccctccactctatcccccagtctctagcaaccactaatctttctgcctctatagatttacctgttttggacatttaatataagtggatactattggccttttgcagctaggttcttttacttagcataacgttttcaccgttattgtgccgtagcacgtgtcagtacttcattcctttttattgtagattaatatttcattttatggacaaacattttgtgcatccattacacagctgacaaaggacattttggttgattctactttttggctattacgaataatgctgctatgaatatttgtgtgtaaatatttgcgtggacatatattttcatttcttttgggtatatatctaagcgtggacttgctgggtcacacggtaacctccatgttcaatattgaagaagtttcagcagcccctctatgagaaaaggtttgggtttctgctctgaggattgagtgtggtcagtgcttggctgtttcgctaggccctcatttttgtttacaccccctctcttcttgtctttcttcccctttatttgcctcttttattctcttttctgtagactccagtctcctgctggttttagtaggaactgaagctttcaccgcctaaaagttatttgtaaaacactttgaactctctggaggatggacattagagtaataatgtttatctgtgggttaggcactcctggtgctgttttgtaacaaaagggcttattgagtaggaggcttatttaacttgttcgggagggttaccctcctacaacatgctgtccaaacagattcttaattacccagctgagagtctgaacgtcttgaggaattactttgaagtttctcgttaatattaccatcatatcatgtaagtctatatcgcgagtttgtagatgtatggagttcctagtgggtgcccggcacataataattgcttaataaattgcgattatgaaacgttactctaatgaactattagtgtttttttttaagaaatacttttttttttttttgagacattgtctcgctctgtcgcccaggctggagtgcagtggcaccatcacgactcactgcaacctccgcctcctgggttcaagcgattctcctgcctcagctgggactacaggcacgtgccaccgcacccgggtactttttgtattttaagtagagacggggtttcaccatgttagccagctggtctccaactcctgacctcaggtgatctacccgcctccgtctcccaaagtgttgggattacaggcgtgagccaccacgtccggcctaaggtatacattttaatactttaaaatgcctaactttttttgggacacactggagttgtttcataacacacaaaataggctttttgagggcactgacataaattctcattgatcgtcacccccacgcggtgaaaaccacacgttacctggcatgttttccggtagttatttttagaataataaagatcgtcttcacctaccccagcaaatttaatgtgctgaacacaacagaaacaacttttctgtggtttagccagccctctctcttcaactaagttatttagtgcggatacgcagagaagtgtaataggagctgctgggccaccaagaaaacgctcttgccattgtaaggcttcgatctcaagcggagatttaccacgcatctcactttaaactgggaaaggaaccgggataaggaaaagagccccctgtgcgagttcgttcccagctcggggttgggggcgtcccaggataaatgagataaatgagttaatcatctcctgcaaggcagccacttcagagttatgtcgcccgcctgcggggactaacgactgcaattaagacgctccttctcggtcccggtcgggttccgtgcagcggggagccgactgtgagtcaccccggccccgggagcccaagcaaaggggaggggagagcgcccagggtggaggggagccgcggggcgaaattctagccccaggacgcctcggaaggaagaggaggggcagctgcgcgtggggaagagaaggaagaggcgtccagggaagggaagggaggaagaaggaaggcggaggaaagagaaggggacgagcgggagcgcgggcccggccgggtggcgcctcggggagtgtctgccgcgcgggggccgggcggggcggggccgcgggcgctcagagctcggcgggggctgccgggattggggcgccgcagctagcgctggtctcggtggcagctcctccgcgccgcaggactcggctctacgggacatgtccgtgccgcgctcgccgcgcgcccgggcctgctagctcctctgtgctccctgaacgcgcggcgccgcacctggcagcggcctcggagctcggctcgggcaggagcgcgcggccgtgcgcaccgcgcagcgaccgctgccgtcatggggctgcagcccctggagttcagcgactgctacctcgacagcccgtggttccgggagaggatccgcgctcacgaagcggaactcgagaggaccaacaagttcatcaaagagctcattaaggacgggaagaacctcatcgctgcgacgaaaagtaagcggggacgcgggcgcggacgggctgcggcgtggcgaggcggctgggggagcctctctcggcaggagacggagggtcttgtgtccggggccagcagccagaggaacggggaattcattccggaccagcccagctctctcggaaccccggggggtccctggaatcattcctcctcgaggcagcgcggcgagtccccattcccgcccctgcggctctgcggcggcgggaaccagctgccagcgggccccgcctgggccccgcctggccccggccgaacacccctcgctgaatgcgcgctccgctggaccgaccctaggcactcctggcccggagtcaggtttcattgctgcctaaagctactcacaatctcttacaaaaccgaggcatctgtttgcctagttttgttttgtgacttctcaaaagaaatttcttggggattctttgaaaccctgcgggagtgttgagttttccagagtccccttaagcttcaccttttccctctcattgtctgatcttccccgacagtcctgttccaggtccttcacgtgccaaaccagaaagtccacctggctttatgctgcttccgcacattcctcccctgccgtgctgaggagggttcaaagattggggtttggaagggtgagcggacagcctgccctctagcctaggcgggcactgcttgcaaatagggaattccaccccggttaggcttggtgccttcctcccctgaacttctgtctcttaaactcggaagaagacacgagatacaggagagataactgtattttagtgtagttgaggagagtctttctaggagagaaggggccaaaattcatgcagaaatactgagttagtgatgctactggaaaatggggcggaattagccccagtgaggagctgggcagcctgaccatcccttggatccataaccccttcggaggatggcggtgaatgtcccctttccccctttaaaagacctgtccatacagcagacagggacttgggcagtatccagccttgaggggctgggttcttagggccttcatcactcacctagattctcagttcagtaattctcagccttaggtattcgtcccttgtacatttgtttgtagataccacctctggggaaaatcccccatctcactgttctcccgaccgcgccccgccccatttttcagtaagggcgattaaaacatattgattatactgtctcgggcacccagcatggtgcctggtacagtaaatatgcatttaatgaataagttgaagtacatttctgtgggaagaatttagtgagccatccctgtaattttggaggcaagtcactcaacttctctggatgatctccaaggttccttttggttctctgacctctttggtgttgcaaaatcaggactgggactcacttagggtttttttgttttgtttttaagtctctgctgcttgaatcagaaatgggactctgggacatgtgacaagtgggcttatttggttgagggctctccaggcccttggcatctggtatgtgtgttgggtgggaagtaggggggcgctatacatatggaggagtgagcatagaaaggaggagttgggagcgggggtgcagagtgaacacgagagaatgaggactgaggactctttctgtaacttgatgttaaccagggtcagtggccgggagaatgtaccttctctctcattggttgtagtagttccctctggagctagagaggtgtggagagaggcagagggcaaagccagtttggccactggtagaaagctatttctgtgacagcatattagctttcctgccatcaggacacatgcgttaggttccagcagcagccagtgcatctggggggccagatgtcagctttcctccagactgtagactttcttgaatttgtgaattagtatcttactcattttgattctcgtcctttagcataagaaacataacttgtaatcatgctttgagagtaattgggaagtgtctttttttctcgttatgttcattaagaatttatgtttaaattctttcccagaaggtgacaggaacacagctgtagctcacatgccttttcccgcttgctccataaagtttacttctagttcctatcaaagactaagagccttggactaaagtcaggggacctgaatttaattcttcttcactggttagggcgtggctataggaaaattgagcaggtcttattcttttgcgtccaacttcccctgtctacctcttaggggaactaataaggttctgcagcatttgaaaatggcttgatgaggttatttgaaactgcagtctaggtaaatggttcatctaaccagttgagcttttgtataacatcagagagtcaagggatgacattgggtggaggatctacagaaagaataaaacccactaggtcagattatttatatttccagatattttatattttattttacaaaaatggccttttgagcatttcgagaagtgtgtatttaagtgatttctatttttaattgccctgcacggtgtctcctgtttgcattacattcttggaagatttcaatatgtaattttgatggcttgatgctttgaagtcttccataaatatttagagttttgaggcctatgcgacctgaaggcttactgctgaattcaattaggtagcaatctgcaaatatttagcacctataatttgctaaatactggaattagatacggatttataatggggtagaggcccttgcccttgagtttactgtcctgtagttgaaattacttcaatctaaggaacatttttgaactccttcctgcactgtgctaaattcttgaagaaacaaaggatatagacacatacctgtgacaaggttaaacatttagtgacaagtattctaacttttccagggacaagggtttgtatgttagagtggaggaggtttgtgaaagttttggaactcactggtgataaggagtagaaccttatcatattggaaaccagaagaaaccagaacactcgagtgtttgaagagactagtttggctggaatggtggtttttcagggagtagtagactgggatggatggagaggtcagttttagattatggagggccataaaaacaaggttaggaatgtggactttatcttgtggagagttactgaaggcttttcagcagaaggctgacataatagcaaagagatggtttagagacagtatcgcacatttgtgtgtagggtgaagttggggatagcgctaggggtggggaggaactccagagagaagagccagtcattttagtggtggatttggagattattcactcaattcaatgaattctttgttcaaatggcttttttagttttctttttaaagtactttcttttcttaaaataaccagtgtcttctttaaatgcagtttaaacttttgtaagccttcgtgatgtctatgtagtttcagttgcttatgattcatacaggtagatagcacagttgccagaaacagcaataaaccatatatgcttttctcataaattttacgttaggcagtcttgagaaaatgtatcttgttctttagagaaaattttttaaaactaacagtccttacagttattaagcactaatacagtgatataaaatgctctgtagtgaacttaaattgtctagctgtgtgtgtgtgtgtgtgtgtgtgtgtgtgtgtgaagctaaaggggccctcattaatgagtctgctgttactaaacatgcatggaaaaggatgtaaagggccttgttagtggcagagcctggacaagaatttaggtcttccgacttggttttggtacttctagccttggcattttaatggtttttgctttgttcctcttaggaaaaacataaaagttctctttggctgtctttatgtttactgtttcagagaaatattcttttggggaaatttcttaagttgccattacattaaacccactgagatttggaagactaaaaataattttcctattttgtaaacttgagccttggtttcctttttttttgtaaaatgggactgatacagaaagccttgaggaataaataaaatggtgtgaaagtgttttgaaacacaaatgtaaaatggttgtgtagacactactgctggttcagccaacattccttttcccctctgacaatccagatttcattcaagtgtctgcatccttttcagatgactcaggggaaggcatttcagggtaattctgattaatctaactcagtggttctcaatcgtagctgctcaataaaatcacctgggggaactgttaaagcagtcagggttaagaaactataagtccgttatgataaacccattttctgggttggtaattattagaagaatgaggttgtatcccagttctgaccaaggagacgtgacaggaagtctgggtactgcagggggaggcttccttttgtcataggagacgcgaagaaggatggttttctacttttctgtattctctcatgatgcctgggactgctacccactatcttgggcctgagggtaagtggcatagcgcgctaactgaatctgggttcttgatgctgttgggagacctgtgggattttctatgctttgaatgtcttgttaaatgacataagacagttttgagttgggttttctgctacttaatgccctaggttttttatttattattatttttagatttttaaaattttatttgagatgtgagtctcgccctgttgcctaggctagaatgcagtggtgcaatcttggctcagggcaacctccgtctcccgggttcaagtgattcttgtgccttagcctcccaagtagctgggattacgggcacgcgccaccatgcccagctaatttttgtactttttttttttttttttgtaaagacagggtttcactgtggttggtcttgaactcctggcctcatgtgatccgtccacctcggcctcccaaagtgctgggattacaggtgtcagccactgcgcctggccttaatggcctaattttgataaagtggtgtaattgtaaattttgtgattatgctcccatcaagtggaatttagagagatacagaaaataaaatgctattttaaaaagttaataaattgcagggtaattttttcccgaatggaaaggaatactcatctacactctttgccttgaagaagttaccatagagcccctacaatttggggcatcacctgggataagtccaactgtcacttggggctttattacagtggctggtctccagtgtgaatgtagaccggctgtgaaaataattacaatcagacttgagccagggtggggacccagacaggcttgaaaagcttgaaatgctttactcactgcaggtggtctttgactccatttagagttgttcctatttagagcttcccaccaggccaccagctgagccatggttatttagaacagattttttactagccagtcagcaatctaatgttctcagtgtctttttgtcacattgcctttctctgtcctcccatctgctggggttcctttgaccagctccttgtcgctgtgttgttgttgttttttttttttttgaggggactagggtacattgtagacttttggataaagaatacagagaggagggtatttttgtgtttaatctttaaaatagctgatggaatataatatagaagattaagagcataagctgaggtactagcctggctgggttcatacccaagctcaaccacctgctaacaggggatccttgctcaagctgcttagcttttctatatctgtgttctcgtcagtaaaatagaaattgtagggctgggcgcggtggctcacgcctataatcccagcactttgggaggccgaggcgggcggatcacgaggtcaggagatcgagaccatcctggctaacacggtgaaaccccatctctactaaaaataaaaaataaattagccgggcgtagtggagggcacctgtagtcccagctactcgggaggctgaggcaggagaatggcgtggacccaggaagtggagctttcagcgagcagagatcgcgtcactgcactccagcctgggcaactgagtgagactctgtctccccccccaaaaaaaaattataatacgacctactatattggattaaaagtaggatttgttaatacatgtaaagcatttagtataagtgctcaaaggttaacaattatgatgacataactaaattacaggcatatattttattatcaaggccctgttcttgcctcaaaatagctgttctgcaccctagaccaggtatctaaccttttagtgtttattacccctaacagtatatttctccaaagcaccattaccagtgaccaagaagagagacaaaattgtcaaaccctggaaaggcttccaaattttgattgtagttcgggatgctggaaaatcttgaaaacacattggtggctgggctcagtggctcacgtctgtaatcctagcactttgggaggccgaggcgggtggatcacttgaggttaggagctcaagactagtctggagaacatggtgaaaccccatctctactaaaaatacaaaaaaaaattagccgggtctggtggcaggcgcctgtaatcctagcttctcgggaggccgaggcaggagagttgcttgaatccaggagacggaggttgcagtgagctgagatcacgccattgcactccagcctgggcaacagagcgagactctgtctcaaaaaaaaaaaaaaaaagaaaagaaaatacattggcaaatcagagctcagtggtatcttgggaaaatattttctagaatttatttttgattcacaaagatttgaagataaagtagaatgtgttgctaaggtcattgcaaaactagtaagcaatctatagtcgaggttcaggcagtcagcagcaggcctttcctccaagtgactgataaggaagagttgatgacagagttcatctcaaggtattgacatgacaatataagtgactgcagccttcaaatacttcaaattacagagatactttttgaggacgtgaactcaaaattagggtttctagcgtctgacatgctggaaatcctaacagcttgtatttgctatggtaaattcacaataaaagaagacgaccagagacatccctaagagggattttcctaagagctgttaggtaatcctgttctctacagtggaatactcaaaagtgctctggacaaattcccaaagaagctgttttgaattctgtgacttcaatagctgtttgtcaccttatatcttgggcttttttttttttttttgacggagtttcgcttttgttgcccaggctggagtgcaatggcatgatcttggttcactgcaacctccgcctcccaggttcaagcgattctcccgcctcagcctcccaagtagctgggattacaggcgcctgccaccacacccggctaatttttgtattttttgtagagatggggtttcaccacattggccaggctggtctcgaactcctgacatcaggtgatccagctgcctcggcctccaaaagtcctgggattacaggtgtgagccactgcgtctggccttactgggttactttttttttttttttttttgagacagagtcttgctctgttgcccaggctggagtgcagtggtgtgatcttggctcactgcaacctccgcctcccaggttcaagcaagtttcctgcctcagcctcagctgcacaccctgtagctagtattataggtgtgtgccaccaggcctggctacgttttgtattttttgtagagatggagtttcaccatgttggccaggctggtcctgaactcctgacctcagtgaattcagagagattagtagcttgtctaaatcacaatttgtcattgatggagctggaatgtgaacctaggtttgtcttcactccaaaaccctgaaccacagtaatgagctgtctctgtaaaggggtgtaaccgtggtcttctgctagggaagtgataatcgatcttgattatctagagtgtgtgtacatttgatctagttaggatattctttttaccttagtatgatgactgatttaaattttgttaaattttaagacccctctggggccattattataatttaaactgattgctaatttgtattatgagtacagtatagacattccaaggtcgggttgatttagtatccattacaagacacagacctccactctgtctctctcaatctccaccttcctcttttcctccccattccttgtcctacccttcagtagagtaacttttaacttattcttttagtattaggcttgtttttcctttgaaaagtttgagatactttagaaatataaaaagatagtctcacaataaacattcatttatttttccccctccccccagcttaatgaaagcatcttgtatacccattcttttccccaaggggtaggacctatctcagatctggtgtttattgttcctaggcattttgatacagttgggcacatccataaacaatatataatgtgtttgcatgtgtttaaactttatataatggtttcatcctatacttttttccctctgaatatatttgtgagattcatccaattggatgtatgtaactttatttcatttagttcaacctttttttcctacaagtgacatttaaaaggactttgttaattgatgttctatgatgatgtaccttctacctatgcattttttggatgataaaactaaatatatttagggaatattcatgatgaaagccttattgaaattagttttataaatttaggatactagctttcaaaacagtcagtaattaataaatccatgaatcttaaagacatttaacccattttctttttggtattttgttaccagcccagcatggataatcagagtaagccagttcatgtctcaggactatatgagaactggtttgagtcagaaacaaaaaatctttaaaagccattttgcttcattgaaattagacttctgattagaaagagaaaaatgatgtttgtataaacacaatgtacatggagaattctggtaactgtcaagctagttggggcagatgaacatgattttcaggcagggactggatggtatcttgtggtaagccccaaagcaaacactggcaggtctgcttcccttacttatcctaacacaggaatgtaattgccagggggatgcttttgtattgagaaggccttgatattgttctctttataaacacatacacacacacacagagaaaaacaccagacactttacattctaaaggcaggcatcttgatatcgttctctttacacacacacacacacacacacacgcacacacacacacacacacacacacacacacacacaccaggcgctttgcattctaaaggcaggcatctctgtaaactctgagatggactggagtcacaccccaagttgctgccatagctaggcctgactccctggtccaactagaatttcctccctgtgtttcctcagaaagacattaatccagtgccacttaatatttcaacggtgagtgtgatttctcctgacttgttgacttgtttacccacaggcatcttctaccctcactcttggtggcaagtcatggtgagatgtgtggctggaagaactcaatttggccacagcagtgtcacctcaggtcagaatacaggatgtggaatggtctcttaaaaaaaaaaatgagtgctttcttttctgactgtaaagttggcctcaccgtttattagctgtgtgactttgggcaagttatttaagccttcagtgcctacatttttctttattagtaaaatggccctagtaagaactctgcctcactggtggtggtatttaatcctcacattacatattaaaagatcttaggactctgcttggctatggtaggtgcctattatttttattattattattaaaataactattttcctttggttgaacttgagcacagttgtggctttacccatagttacaggagaaatagtctgtgaacacttttttttttttttttttttttttgagatggagtctcgcttttgcagctcaggctggagtgcaatggcacaatctcgactcactgcaacctctgcctcccgggttcaagcgattctcctgccccagcatcccgagtagctgggattataggcacctgccaccacgcctggctaatttttttgtatttttagtagagatggggtttcaccatgtttgccaggctggtcttgaactcctgacctcagtgatccgcctctctcggcctcccaaagttctaggattacaggcatgagccactgtgcccagcgcatgtttttttcttccaatctaatcatattttgaagcacagagctgaatataggcctctcatttatacataggagaaatcatccataatagtgttgaaatctgatgtattactgaaagcctttttttttttttttaaagttttggggacaaagccagaagtacaagggaatacagtgtccttgacatgacattacatttatttgagaatcgggcagattctctgccatactgatcgatagttttttttttttttttaatttttatttttggagacagtctcactctgtcacccaggctgcagtgctgtggcatgatctcggctcactgcaacctctgcctcctgggttcaagcgattctcctgcctcaacctcccgagtagctgggattacaggcgtgcaccaccatgcctggctatttttgtgtatttttagtggagatggggtttcaccatgttgaccaggatggtctcgaatgcttgacctcgtgatccacccgcctcagcctcaaagtgctgagattacaggtgtaagccaccgcgcccagccgatagttttgtttttattttgtgaaatgcgaatcaaaggcagcacagcaaacatactaaaatagataggtctttgaaaccaggtttacttactgtgtgaccttgggcaagttgtttaacttctctgtgccttgatttcctcctctgtaaaatgtggataatagtcagctgggcacagtggtgcacgcctgtaattccagcactttgggaggctgaggcgggcggatcacctgaggtcgggagttggagaccagcctgacaaacatggagaaaccacatctctactaaaaatataaaattaactgggcatggtggtgcatgcctgtaatcccagctactctggaggctgaggcaggagaatcgcttgaatccgggaggcagaggttgcggtgagccaagattgcgccattgcactccagcctgggcaacaagagtgaaactccttctcaaaaaaataaataaatacataaataaataaagtggataatagttacatgtttaaaatgttgcaaggcttaaattatttttaaagtacttagaaaaattgcctgaaccatagtgaactctctctgtgtttgctaggcgtagaaaaaaaattaaaaatatattcagtcatcactagaacaaccttatttatgacagtggtggagtggtgtcatcttgtcactgaactctagctatggtgggctagttgctagaggtttgtgagaagaaacgtgtatattagtgcagaagagttctagtgcaggagacagcaaatttatttaaaaagcaattacattcacattgttgaatcagtatgggatgcgatgactgtagttaacaggactacctagtttgggggttccaagaagacttcaagaaaataaaacttctaggctgagaccaaaaggagggatcagagctttccctgctgagagtggggaagaagtattctccaagtgcagggaaaatgcatctgagaggtcagagagagcacatcctgtggatggaaaaatggtgctcaggtgggccagggaatctgcattgaggataagaatggtgctgtcgagggggtgggggagggtcaagaaggcccttggaaagcaggttgagggctttactctaaggacagtaggaagtgatcgaaaagttttgtgtaggggagtggtgtgagttgaattgttgtagaaagctttctcggagtgcagttgtgcaaatgaatcggaggaaagcaggactggaggttggggggtcagtcatccaggccagagactttggtggcagaagaggagtcaagacttagcagctgcaggctatagggggtgattgggtgtgggggctgccctgacacctcaggttctggtgtgggctggtgagtgcagttcactgaggtcctgccacagcagcagcttttgtgggagagaggatgagtttttggttttggatgtggagggcaaggtatttcgtagtagccaggagacatgttcagtagtgtgtttcttttatgggtgtgtatttcaggaatggggaatacagctggagataaagattctggagacacaccatatggatgggaaacgatgccatgcagctgaataccgaggctgccgagagagaatgtagagggagaaggcagggagagggtcagggcaaatccggaggaactccatcttttaaggggtaggtgaaagaagaacttgaaatctgagaaacagtagccattgacagagagatggaaaaccaggagagggtctcaaaagccaaggagaaagagtgttcagagagcaggagggagtagacaaggccatgccacagagaggtcaagtagcttgagtcaaggtgacattgtgttggccacacactgtcattggtaatagtgggagagtagtttaggtggccaagcagaactgggagcctgcttgcagagggctgagaagggagtgtgaggaaagtcagtgaacttgggtacggatagctctcctaaattatttggcctgccatccaaatacttcaaaacattcaaccctgtcttcaagcaggcttgaccctgcttagcatctgagatcagacagggttgaatgtgttcagggtggtgtggctgtagacccagattacgtggtcagtgggagaggaggagatggaagattcaggggtccatctcagagcacaaagtgtttgtttgtttgtttgtttgttttgagacggagtctcgctgtgtcacccaggctggagtgcagtggcgcaatctcagctcactgcaagctccgcctcctgggttcacgccattctcctgcctcagcctcccgagtagctgggactacaggcgcccacaaccacgccctgctaattttttgtatttttagtagagacggggtttcaccgtgttagccaggatggtctccatctcctgacctcttgatctgcccgcctcggcctcccaaagtgctgggattacaggtgtgagccactgtgcccggcctttttttttttttttgagatggagtttcgctgttgttgcgtaggctgggtgcagtggcgtgatctcggttcacggcaacctccacttcccaggttcaagcgattctcctgcctcagcctcctgagtagctgggattaccggtgtgcaccaccacacctggctaattttttgcatctttttagtagagatggggtttcaccatgttggtcaggcttatctcgaactcctgacctcgtgatcttcccgcctctgcctcccaaagtgctgggattacaggcgtgaggcaccgtgccctgccacaaagtgcttcttatttatttatttaattattttgagacagagtctcactctgtcgccaggctggagtgctgtggcgtgatcttggctcactgcatcctctgcctccggggttaaagcgattcttctgcctcagcctcccgagtagctgggactacaggcatgcaccaccatgcccagctaatttttgtatttttagtagagacgaggtttcaccatgttggccaggatggtcttgatctcttaaccttgtgatccgcccgccttggcctcccaaagtgctggagttacaggtgtgagtcactgcgccaggcctgctttttttttttttttgagatggagttttgctctttgcccaggctggaatgcagcggcgcgatcttggctcactgcaacctccacctcctgggttcaagtgattctcctgtctcagcctcctgagtagctcgcttgccaccactccccgttaatttttgtatttttagtagagacggggtttcaccatgttggccaggctggtcttgaactcctgacctcagctgatccgcccacctcagcttcccaaagtgctgggattgtaggtgtgagccaccgtgcctggcagcgtgcttcttaatatagaaggtgggattcatattctaggtgaagaagtggtgggagggtgtacctttcacctgtttcatgacagaggagatggtaaatgatgtctacacactcaaattgtagatttatggcaggacatcgaggaaactgtcaactgatggatttattttccctgaggtagatgacaagattcagtaattctgttttaatctctcccccaccacattctttttctggttgatattaatactacatgacttgtaagagtggttttcctcatagtctgtttgaactgagtgggatggcatacagatgttaagctgagaagaggtaatggggttaggggagaaaaaggagttaaatgtttgggtaaacaaccctcatgatacccagaaaggccgctgtttcaggctttatttcacactttgttctgttgcacttaaaagacccaaacggtccttcatcttttttttttttcccccaaagtattaaaaccgattttctcttttatctcaccggagtcatgctgattctctttggatgtctacagggaataaaatgcctctggcagcacctgggaagattgtaggacttccaagtgtctgcctctttgtccaagagaagaggaggaatagaaattgtaagagttaaaaatggaataattatctattatctaaaaatatcttctcttgctcttttctagctaactacttaggttcaacctagttgaagaaacaatgcctagaagaaataaatgcttacaaaagatacccatcagtgggtggtatgcagatagcccttgtcttcccttcagggctggacaccctgaccgccatggaggtggccacacagcatcccttcagggatgtggagtgtggagaccttcagatgcttcagagggaggatatgagtggagaagttctttgcatgtgtttctagagctagagttggtgtcctgtttttttgtggaaaggatagagtttaaaaattaatctgaactttttcttcccctttcttcagattattgttataaaaatactatggatgctcatttatttcagctgtcagtgagaggaatcagactaaaaccttgttgaagcaaaagaaaaaaaaaagaaattttggcttgtgggtgaagactgaagactaaagacctttcttactgcactgggaattccagagaatactgactctttttccctagaccagtggttctcaaatgggtgattttgactgtctagagacaattttggttgttactttagggagatgctatggtttctagcgggcagaggccagtgatgctgctaaacaccctgcagtgcacaggacagctcccctacaatgaagaatgatccagccccaaatgttcgtagtgctgaggttgagaaactctgccttagagatagggagcccatgtaatctaaacccagatactcttgagaagtacagttatgctaagacaataaccatgaactggaattgctacaagtatacctggacctgtggttgctctacataaaggccttatcagtcctgggtcacttgcccggcatagaccagtcactgagatgtggtggatgttgtactttggccagcctgaatcatgtgcctaccagtcgggtgaagaagtgggcagcaagtgattgctcggacagaatgccacagctcacaacaaagggtatagaaactagtaaaaaaaagctgatgtcttgtaccaagttttagttttagaaaataagatctggagatctgtataatatggagcatatgattaacaatattgtatacttacaattttcctaagagggtagatcttatattaagtgctctttccacaaagggaaaagaaaacaaaaacaaaatgatacagggagtgggaggaaacttttggatgtgatagcattgataatgatggtggcttgatggtttcacaggtgtatgcttatctgcaaacacatcaagatatgtacattaaacacacaaaaagcagtagataggctgggcactgtggctcaggcctgtaattccagcaatttgggaggctgaggcaggaggattgcttaaggttaggagtttgagaccagcctgggcaacatagaccctatttctaaaaacagggttgggggcgtgggggcacacacctgtagtcctagctacttgggaggctgaggtgggaggattgcttgaatccgggagattgatgctgcagtgagctgtgatcatgccactgtattccagcctgggcagcagagtgagaccctgtgtcttaaaaaaagaaagctgatgtcctatacataagataacttttacttttgaaactcactttattagacctgttttgatctgggcctagggactgcacatggcaaaacaaatgaggactatatgaaaacagtcaaaataagtatgccttctatttttttccccgttgcttggttgattaattttaaccataatagaggaggtgagagagatgaaattggcaagagggtggaaatgaagactgtgattcctgtagcttgcctggatacaaggacaaggttgttggcacagtgaggtatctatgccttataatagaacccctgaccagaggaaaaaatttagattaaaatacttaatatttataacaccttagcttgttgtaggccaagaaaatatttaaagaattaaatagcagtttactggcttaatttaaatttctgacactgatagttctcctatttatttttgaagaaacaaagcattgttaagaaaaactaatttttgtgggtatcattaatccagcagaatggattgaataattttacattctttttacctttaaacaaagaaaacatttcttgaatggaaattagaacatatgtattttctaattttgtatgttcttgatttaattttaaatttgaaatcaattgagaaatcctttaagcatctagaaaagttgtctaaattattttcttctgaaactgtattatagtctctggaaatattttccatctttcgagtttattgtgtatgcaggataaaatccaacgtaaggatttgacagtaggtagctatttgcactattttctgttcattgcaataagagaactgagacggtcaaactaaatatttgttatgtaaactctgaaatcttttagaatcgactgttgtggcttaattgatactgtctaaaaggcttgaatggctatgcaaattaacctgttgatgaacagccatgtatccagaaacagaatgtatcacttaaccacagcgaacagtgttttgtttgcaataagatggttgagtgctttttggcagtgtttacctgagtgtggcaggactgatttatcttgacaagcaaagaacaaaaagattttaaaaagtgcttctttgtccagaaaacaaagaggcaactttgtaaagacctttgtattttttgaccttaaaattttcattccaaaagctttaaatttgaaagtgtagttttgagtcaacacagtttctcggtttaatgtatgcagtgagaacaaaatggaaaggagtggagagggagttgtaccatggtggaagtgaatgcatcagggagcatttgacccttggaaggtgttggagggtcacctagaatgaagggaggtgtttaatttctttctgactgtggcgtcagtttaatgaatgcataccaaaagtcagagtgtacattaggaagaaagaatggaacgggattaatacataattcagctttgtgtgtgtgcattgtgtttgtgtgtgcataatctaatcgtagtttacatataactaaattaagagggattggtgatgatttctttaaagggaatagtcatcacccaacctatttgttttgtgtgcattaatatccgtttttatgtgttggatttgcttaaatggaagtacatataaaatatctttttttttttttggggggggttgtaatctcactctgtaacccaggctggagtgcagtggcgtgatctcagctcactgcaacctccgcctcctgggttcaagcgattctcctgcctcagcctcctgagtagctgggactacagtcacgcaccaccacgcctggctaatttttgtattttttagtagagatggggtttcaccatattggccaggctggcatcaaactcctgacctcgtgatccgcctgcctcagcctcccaaagtgctgtgattacaggcgtgagccactggtgcccggccataaaatatcttcaatttaaaacaatgagctttggagggctcattgtgggcaggtcgcgtgaggtcaggagttggagactagcctgatcaacatggtgaaaccccatctctgctaaaaaatataaaaattagccgggtgtgatggtgcgtgcctatagtcccatctacgtgggaggctgaggcaggagaatctcttgaacccggaaggcagaggttgcagtgagcccagatctggccactgcactccagcctgggcaaccgagtgagacgccacctcaaaaccaaaaacaaaaaaaacaaacaatgagtagatcactattgttttagattagagatgttagattttaattgacctgatatataagtttagctattgttaaacattatctgagaagtactaaaacaagtttactggaattaatgataataatggtggtgtttgtagtaggagtagataatagttgttgtttttttttttttgagacagagtcttgttcttccacccaggccagggtgcagtggcgtgatctcggctcactgcaacctccgcctcctgggttcaagcaattctcctgtctcagcctcctgagtagctgggatgacaggcgcatgctaccacgcctggccattttttttgtatttttagtagagatggggtttcaccatgttggccaggctggtcttgaactcctggcctcaagtgatgtgcctacctccggccccctaaagtactgggattacaggtgtgagccactgcacctggcctttttttgctttttttggagcacttgtgtttcagagactgtgcccagtgttttcacaggagttagcatttctcacagcagtcctctgatagttaatctcgtaataattgccattttgcaatttaagaacgtgggtttagagaggttgacatttgcccgagggtactcatctaggtagctgaggctcctgcaagttatacactttctgaagcctttagtttttttttttttttttttttaagatggagtgttgctctgccatcaggttggagtgcagtggcatgatctcgactcactgccacctctgactcccaggttcaagcaattctcctgcctcagcctcctgagtagctaggactataggcgtgcgccaccacacccagctaattttgtatttttagtagagacagggtttcaccatattggccaggatggtcttgatctcctaacctcatgatctgcctgccttggcctcccaaagtgctggaattacaggcatgagccacaacgcctggccaagcctttagtattatagaagagcatgcattattgtcattgatacagtatttcacagatctgatttggggtgttatcttgtgtaaagtcgtggggttgtaatgtctgcaaagcttactttcgggaaattaaaaattttctatcaagtgatagaaacttcctttaagctattaaaagttataggaaaggaagtcattttcatataatctggaatagtggctgtgctattttatttgcattacaaaaaattgaaaaaaacgctattgtttgcttttaaacaaagcagactttaaaaagtaatgttactgttaatgatttaatagagggtacacaggtttaatctgtactcacagtttgatcttttttttttttttggtgacggggtctcatttgttgcttaggctggcgtgatcttggctcactgcaacctccacctcctgggctcaagtgattcttgtgcctcagcctcccgagtagctggaattacaggtgtgcgccgccatgcctggctgatttctgtattttagtagagacggagttttgccatgttggccaggctggtctcaaattcctgacctcaagtgatcctcccaccttggcctcccaaagtgccgggattacaggcgtgagctgccgcacctggcctgctttactattaatgctgatctgggcctttgattaaatttgctgcttatctcatgcctgtgttgccattttattttcttcccaaataatagccattccttttatttttagaagtatttttattctctttggtgatggtattctcaatgtatttaatctgaagtaaattttctccagattcacctatgaggagcctgctacccagaaggttaagaattttgtccaaagtcatatggcaaagtaatagtatcagtgaagacactgtagtcagttttaaaacatttcagagtttagccagtaaatactgaatttagtaaacctcaatttgcgtatggaaagctggaaataaaactcgtctcctgactgctgtgttggagctggaaggaatgtccaaccttcttacaccatagataaggaaacatgaaacatgcctgcagcggccacttagatatatctgctctgtcctgtcagttcaggaagctcatttctagtgttgagtttactctgaagtcaattttcttttcttttctttttttttttttgagacacagtctgttgtccaggctggagtacagtgatgtgatctcggctcactacaacctctgcctcctgggttcaagcgattctcctgcctcagcctcctgagtagctggggctataggtgtgcaccaccgtacctggctaattttttggtttttttttttttttagtggagatggagtttcaccatgttggccaggttggtcttgaactcctgacctcaggtgatctgcctgcctcagcctcccagagtgctgggattacaggcgtgagccactgcccctggcctgaagtcaattttcttatgtttgtttgcagtgaacaagtaattaaggaaatgaaccagtaaatgagaaaattatatttgagagaatgatttttttcccctttcgaaactattttcatgatgctcacgtattcatgaatgttgaaaatttacattgggatgagagtgagagagtattgaggctgcaccgtttaataattccacatgtatgagagtccttcctcttgatgcttaatttgtggttagagagattaacaaattgagcaaagatgatgtgacattatttcatagtttggggcttccattcatctgctactactcgttctaagaaagacctaacgttcctaaaaactttgatacccctcaccttgcctgtgttccaggttccagtaaactcctggcttactgagggcagtgtctgtctttcgtcctccagcagtgtctagaacagtgccttgctcataggcactgagtcagtacccatctggctcctggaatgtttgagttggaagtcccagaagtctagaatgtttatttaggttaagctaagaagcagatgcaagttgagggaattcagggcctttaattcttgttctgtttccaggtgtcatttacataaggcatacgatgccttttgtaagtaactccataccatttgttgctattgtagttcctcttgcaaattcctgctgagtactttgatgcacaggaggtgaaaggggctagaaagctgttttggccttagttgagttgatgaaacttcagaacgttaagacaggcttagaaaggagtcagtgttctggggcacagttgggatagtgttcaaaactactgagggccccaaactgcctccagatagaaagaaaagctcagtgggggttgttagaaatttagttcctttggatgaatttctgttgtctttccttgatgatagtttatattcaacatactgaatgtaattgtattcaatttttttttttgtctttcaccagctagagaatttgggtgaaattttactgttacacatgtgcattagcactgaatttgtttaacataaagcaaaataacaggaaaaagacaaatataaatgattttgctacataagttgtacattcttctgttagaattataatgaagtccctgaagaaatattaaaatccggctgggcgtggtagctcacgtctgtaatcccagcactttgggaggtggaggcggctggatcacctgaggtcaggagctcgagaccagcctgaccaacatggtgaaaccctgtctctactaaaaaatgcaaaaattagcggacgcctatagtcccagctacttgagaggctgaggcaggagaattgcttgaacccaggaaatggaggttgcagtgaaccgagactgcgcagttgcactacagtctgggcgacaagagtgaaactccgtctcaaaaaaaaaaaaaaattctttcaaaatgactgctttaaaaacattccaaacaataaggatataataaaagcaaacttattatttaagtaaaaccaaagatgtaacatttgaagtttttgttattttaagaacaaaaatatcattttgttctcattaaaatttttacttatttttacttgttaaattttctcttacataaccagtcttttgtgatcaactcagtctgggcgttctgtgttcatggcatttcttcccagttaattcattctagaaaactgcaaggtgttttgttccatctgactgtttgtaaacaggaagggaccctagctactcgggaggctgaggcaggagaatcgcttgaactcaggaggcggaggttgcggtgagccgagatcacgccattgcactccagcctgggcaacaagagtgaaactccgtctcaaaaaaagggaaagaaaaaaaaataccagttccatgttatcaagaagaaagagagggctgttttggaaaacactaacatcattggccttttctttggcgagctgctggaatattttaggaagtagctgtacttttgctcttataaacacagttaaatagatactgcctcttgtccttctcttgcccttatatagtgtaggtgatatttttctatttggctcttttagaagctggactatcacgaaagaaggtggggtgtgggtgtgtgtgagtggttgtgggtgtgtgtgtgtagtgcattatgagtcagcctctgtggctgtttgctgtgtattttgtccttgttttgtattatttcacatatgtgttgaggagcaatgcatcagtaatgaatgtaacagaagagctgcatgtaacagaatagccagttatcaactggcttttagaccttgaccctgttggtaattttttttttctgtcacataataagtcaatagtaggtggttgctggctagttgtcagtggtgaggattctaaaaatttcttgcctttttcctcatggttgcaagatggcctagtcattacacccacccacttactaggaggcaaaaaaaaaaaaaaagaaaaaaaagaaagggaggatctgtatccaaggctttcccaggactctccagtcagcttctgctaatacctcatgggccgcagttcttaattgctctccctagccccaagtaagtctgggaaaaatttgtttgtggtccagcccttgttgtagaggaaggtgtgggtggtggggggagtataaaatattggaatggctgttgaataaaccatttctggatcttctaaaaacagttacacactctagagtgggcatctcaggagtgtttctccattaacttcagttaatcagcaggtctttgatgagcactgttagtatgaactataccatagtcccccttatccgtggtttcagttacccatgatctgaaaatagtacatgaaaaattccagaaataattcatgagttttaaattgtgtgctgttctgagtagtgtgatggaatcatgtgccatcctgctccatcccacctgggatgtgaatcatccctttgtccagggtatccacactgtatggttgtatgtataggaagaaatagtgtatataaggtttacagtgctattcatggttttaggcattcactggggatcttggaatatatcctccctggataaggggggaccactatattgttattggtcttagggagttagagggagaaatgcaaatgtgtaatgtattgtcttattagaatttacagtctggttatgggaatacaacacagaaggttgtgtaattgtttttttttttttcatcagattataagaagagggaagggcattcatgaatgcctggtataatggaaaaggctcaccttgaggagaggggccttggttggtctaggctggtggcagtgcagttgcagagagagtgagagcgagagagagagagaaatgaatgatgccagagggaacctgggctatagtggcttctttaaatttacggaaaaatataaatcaaagatgataatcttttcagcttaggagatgaggcaaacattggatatcagaacctgaaagttaatgggaacacaggacagtctagccttttttttttttttttttttttgagacagagtcttgctttgtggcccaggctggagtgcagtggtgccatctgggctcactgcaacctctgcctcccgtgttcaagcaattcccctgcctcagcctcccgaaagctgggactacaggcgtatgccgccatgcccagctaatttcttttgtattttagtggagatggggtttcacagtgttgcccaggctggtcttgaactcctgagctcaggcaatctgcccgcctcggccttccaaagtgctcggattacaggtgtgagccaccgcgcctggctggggcagtgtagctttgagagaaggcttggtgacccagctggtcctcccagttttgctgccatgtccatcatctagatttccctttaccagctttccatctgctgtagcattgacaacttccatccgttcatagcctctgcttcctccgaacattggcttactcacgggcctctacggtgagtgtcctcagcttcaccttccacgactgcacacctgggtacttaacctgttcttcagtcaccttcctaagagaatctggttggcccagctaattaccgttgtccttgtttcggaagaggctgtcaggcctggctcacgctggtcattggccaacctgtctgttcccttccctgggatctggtgcccatccctgtccagtcacctgtgatacagaacaggtgtgcccgagactgctacctcaccagggccagggagaagaggggcaggcaccatacaaatacaagcctggtacgtgtgccatagcttgctttgtgcacccctattggttttataaacgttacattagataaaggaactgttttccacctctataaagaatttggtgagaccagcctggccaacatggagaaaccccgtccatactgaaaatacaaaaattagctgggcgtggtagcacatgcctataatcctagctacttgggaggctgaggcaggagaattgcttgaacccgggacgtggaggttgtggtgagccaagattgcgccattgcactgcagcctgggcaacaagagcgaaacttcatctcaaaaaaaaaaaaaaagattttgatgtagttatgtatgaataaacctaaacctttggctaatttttttgatattttaattcttttagcagcttattgagatataattcacacaccacacagttcatccatttaaaatgtataatcaatggcttttagtgtagtcacagattagtgcagccatcaccacagtcaattttagaacatattcatcaccccagaaagaaagcctgtccccttttggctaatactttttgatgctgatgataacaggtccatgcctcagtgtgttgctcagggaggcctttctgactgtgctgtttaaatgtgcattccttctccattctttgtcccctgtgcctgcctatttttcaggcaggttgttagaatacaggtggtgtatttttttttaatttattattattattattttttaggctgagtgtggtggctcaggcctgtgatcccagcactttgggaggccgaggcaggaggatcacttgaggtcaggagttcgagaccagcgtggccagcatggtgaaacccggtctctactaaaaatacaaaaattagttgggggtggtggtgcgtgcctgtagtcccagctacttgggaggctgagacgtgagaattccttgttcctgggaggaggaggttgcggtgagcagagatcgtgccactgcactccggtctgggtaacagactctgtctcaaaaaaaaaaaaaaaaaaaccgaaaacaggtggtatattttttatgcatctactttttgtctattttcttcaatgcaaggttcatggaggcagaggtttttgtcttagaataagtaacacatggtagatacaaagacaatttgctgaacaaatggtttattactttgctgatagtaataaactattgtaataaaatagtgataacactgtgttactttgttaaacttccacttaccagttttatctgagaactccgtatgttgtctcattgaagaactgttatctccattttactcttagagaaacagaggctcagaggtgaaataactttcccaaaccaggaaactgccagaatgaatttataagtcattgttgtctatgaatacaaatataatgcaaggcacatatataatttaaaattttctagtaaccccattaaaaaattaaaaaacaggtgaaggtgtaatggcatgtgcctgtagtaccagttacttgggaggctgaggtgggagaatccctttagggcaggagttcgaggctgtagtttgctatgtttgtgcctgtgagtagccaccacactcctgcctgggtagcatagtgatacaccgcccccccccccctttaaaaaggaaacaggtgacattaattttaatattttacttaatctggcgtatccaaaatattatttcaacgtgtaaccagcataaaaatgattgagatattttgcatgctctttttttcagatagtctttggacttcactgtgtatttaatttaatttgattaatttattttgagacagggtctcaccctgtcgcccaggctggaatgcagtggtgggatctcagctcaccacaaccctcgccttccaggctcaagtgattctcctgcctcagcctcctgagtagcggggattacaggagcctgccaccatgcctggctaatttttgtattttttagtagagacggtgtttcaccatgttggccaggctgatctcagactcctgacctcaggtgatccacccgcctcagcctcccaaagtgctggaattataggcatgagacactgggcctggccttttactgtgtattttatacatatagtacaaatccattcagcccaggtacctttcagtgcccactagccccatggtcttgcatctgtaaccttgctgcttccctgtattcaggctgtcactcttccattttgggaggataatacgcagtatctacacctgacatttgtggaggctgaccatttacaaaaagcttaggtttacacactcagctcattagattttcacaataactgaaggaggtaagtgcgtcgggttacaatatccagttagtatagaaatgtttacagatgactatgtcaatatctagagagcttaaccagcttgtccagatttatcaggtttctacttggcaacgtcagggtttgaatccagcagctcccgtgagtccacatcactgtgtgctgcttgtggacagagcggcagattggggagaggcagagtctgggtgggaaggtagaaggggaggggccatacttttctaagtgtggggtagtccttcaacataaagggtttgtctgtcccccaagtccatacctggtgttctgatggacttactctgttggacatacacagagattccttgtgcatgattttagccttggctcattttgacctctcccatttttccctcttgttttgaacattgccctttattccctaccctaattcatgtcttatttcttcttttaggctcattcaggctggtttccctaagtcccagttgaaggggggctatgttagtctcctctgggagggataggaaaactgctctgctgtgaatggccggtggggctttcagtggctgagagatggtagttcctgggtggctgccagcctgccagacttgggcaaactatgtgtattggaacaaaaggctgagtgtgaaattaatagctctcaactgagaactgtaaaagagctggttgtaggtaaaaagaggcagtttattttgtaagttagagttaactttttttttttttttttgacacagagtcttgctctgttgcccaggctggagtgcagtggtgtgatcataacccactgctgcgtccaccttccaggctcaagcaatcctcctgcctcagcctcccgagtagttgggattacaggcatgcaccaccatgcccagctgatttttaaattttttgtagagacagggtcttgctatgttacccattctggtcttgaactcctggccccaagcaatcctccctccttgacctctgaacactctaggattacaggtgtgagccactgcacccggcgtaatctctatatagagttaaatttgtttaaaattttaaaaatcttttctaggtttttctccttttagtagtaatcgctgtactgaccacaagtgggttctgtgtatgtttcacatttgtatgtggcttctttggtacttttgggtggcgccaacagcatttgatttcaaccttgtgggtctgaagcattattttagtggttcctctctgattctcaaaacttgatatttgaatttatctctttctcttttccacaggtgaaggagcagtctttcaggaaaggaaggaatgtttttgttgagttagcaattatatcaggcatttaaatttactctccataaaatataattgcctggaattctgtaaccaaataacagcaaacagaatgaattgggaaatctgcccatttggaatatacgggctagtttacctttcatagtagtagagttttcttaagattttgtgctgattggcactaagtgactttgaaggtgattttaaagacggcattactaggaaaaacgaaggagaaaaagttaagtgaattaaatgagtagccacttgctttggactttatgtagcagtaacagcagcaacagcatcttttcttgttcattctcttgactctacttttcatgcttacacccagatcagaaactgccagattctccattagaaattcattccctctttttttatttttattttttgagacagagtcttgctctgtcacccaggctggagtgcagtggcacaatctcagctcatcgcaacctctgcctcctaagttcaagctattctcctgcttcagcctcccgagtagctgggaccataggcatgcgccaccatgcccagctaacttttgtatttttagtagagatctggtttcaccatgttggctgggcttgtcttgaacccctggcctcaagcagtctgccttcctcagcctctcaaagtgctgggattacaggtgggagccactgcgtcctgcccagaaattcattccttttgaaatctaggtatgccacaaattaatgttatttctaactggttatactctttagcattggtagacctaaagataattagttttagaaggtatggaattatagcctagtggaggtttaacaaaaggaaaacaagagttgattgggtaggtgaactagcaaaaaaaagataattgcttatttatttatttatttatttatttatttttatttatttatttatttattttttttgagacggagtcttgttctgtctcccaggctggagtgcagtggcgcaatctcggctcctgcaagctctgcctcccgggttcacgccattctcctgcctcagcctcccaagtagctgggactacaggtgcctgccaccacgcccggctaattttttttgtatttttagtagagatgggtttcaccgtgctagccaggctggtctcgatctcctgaccttgtgatccacctgcctcagcctcccaaagtgctgggattacaggtgtgagccaccacacctggccgcttttttattttttaacttgactaagtggactgtgatggggagtggggtagattgttgctcatcagaacatctgtcgcccttatctactctggattccatttgctaggggtaatgaaggataacaaaagacttttatggttaaggagacaggacataaactttgacaggacataaacataaggaaagtaaaagcagaatgagctaattatataatatgaaaacagaaaacccataataaaactgtataagatttattgcaagatggctactaaagaacagtggttctcaactttcagtatgtattagaatcacttgagaaacttaaatactaatgcctttaagaaaatgactgtttttttgttatattttaattggtctgataatctgtaagtttagctattgttaaacattatctgagatgtactaaaacaagtttgctggaattaatgataatggtggtgtttgtagtaggagtagataatagtttttttttttttttttgagacagtctcgctctgtcgccaggctggagtgcagtggcgcaatctcagctcactgcaacctccgcctcctgggttcaagcgattctcctgcctcagcctctcgagtagctgggactataggcatgtgccaccatacccagctaatttttgtgtttttagtagagatggggtttcaccatgttggacaggatggtctcgatctcctgaccttgtgatccgcctgccctgacctcccaaagtgttgggattacaggtgtgagccactgcgcctggcctggcctggcctggctgagtgattttattctgcctgctttgggatgaaggctgggcattggtttgtttgagaaccctgcaggtaattctaacatgtagtcaggattgagaataatttttatagacagatggtgattcctttttttttttttttttttttttttaaaaacagagttttgctgtgttgcccaggctggggtgcagtggcaccatcacggctcactgcagcctcaactttctgggctcaggtgattcttgtgcctcagcctcctgagtagctgggattacaggcgtacgccgccatgcctggctaatttctgtattttgagtagagacagggtttcaccatgctggccaggctggtctcaaactcctgacctcgggtgatctgcctgcctcggcctcctaaagtcctgggattgggattacatggtgaaccaccatgcctggcccagacagtgattcttgatctttagtgggaatcaaaatcagctgaatagagttggataggtttcctggaaggtaggacgtgagcaagtttctgagtaatgtataaagcttgtgagaaagctgggtgggaaaatacaaggtctgtttggggtattgatcgagctaattttggtgggggagtaatgtgagatgagggtgggaaagtagccttcaataccactttgagtttagatttcatatttttagacttggagataggtgaggctggagaccctagtctgagcttgccaggagagaggtgggtcagtaaacagcacctgaagaccaggcacacctaacactataggaagtgcctgttctgtgggaggtgactttgaagtgtggctgatctcccatcggctcccatgcagtaatagtgactttgaggtaaaaaaaaaaaacctccaaatctggaatcaattaaaattcagcaaacatttatttttttattttttgagatagagtctcactctgttgccaagggtggagtgcagtggcgtgatctcaactccctgcaacctctgcctcttgggttcaagggattctcgtgcctcagcctcccaagtagctggggtttataggcgtgcaccaccatgcccagctgacttttgtatttttagtagagacggagtttcgctatgttacccaggctggtcttgaactcctggcctcaagtgatccacgtgcctcggcctcccaaagcgctgggattagaggcatgagccactgcacccagcccagtaaacatttattaagtgtgttttatatgacagatgtgctgaggagctgtaagtttatttttcagtaacatgctgagagtgtttttaaaagtaatattttgggccatggaaccctttgagaaataaaagtaggagctgcttttccacaaaaatgcccaagtacaagtaatcttgcataagttttagggcttttggatactctgaagtcaactcataacctctgtaggtgttcgtagattccaagttaatttttagaatagactgtggactaatgatggaccatgttggacagggaaatggggaaatctaggagtccacgctattttcagtttttcttgttaggcataatttatcattgtgagtcatttaagatctatttagcaaatatttttgaatgaagtttacataattcacagccaggtgtttccaatatcatacctggaaatataaagtacacattagaacagggatgggtgtgtgtgctgtggtgtgtgtgtgtgtgtggggggggggtgtgagtgtgtgtatttcaatgtgccacgcccattttcattcctgacagactgcaaagtaatgggtgtgtctattgtgttacgtcttctgattaaaacacaaggtgggatataactcagcaattctgagcatttgctgaagaatgctagtgctgatagaagtttcatgaggttgggtgtggtggctcatgcctgtaatcacagcactttgggaggccaaggtgggcagatcacttgaggtcaggagttcgagacaggcctgaccaacatggtcaaagcctgtctttacaaaaaatacaaaaattagctgggtgtggtggcacatgcctgttgtccgagctactcgggaggctgaggtgggaggattgcttgaacccaggaatttgaggctgcagtgagccatgattgcacaactgcactccagcctgggcgacacgatgagaccctgtctcgataaaaacaaaagaagtttcatgcaaacagtatctgaagtcagaattcttctatagctcatgacatgttctatcccattttggagatacacaatgctgtgattacagttatccctccatatcctcgggggattagttccaggaaccccttgaatacccaaatctgcagatgctctcaagtcccttatgaaatggtagtatttattggctgggtgcggtacctgtaatcccagcactttggtagtctgaggccggtggatcacttgaggtcaggagtttgagaccagcctggccaacatggtgaaaccctgtctttactggaaaaaaaataaataaataaattagccaggtgtggtggtgggtgtctgtagtcccagctactcaggagcctgaggcaggagaatcgcttgaccctgggaggcagaggttgcagcgagctgagatcatgccactgccctccagcctgggcgacagagcaagactccatctgaggtgggtaaaaaaggtcgtatttgcatataacccacccatgtcctcccatatgctttaaatcatctctacattacttacgatacttaatacaatgtaaatgctatgtaaatagttatattgtattgttcagggaatataagaagaaaaaagtcagtatgtaagcaaccatcagttttttccctcaaattgttttgattgcagtcagttgaatccatggatgcagaactcatggatatggagggctgtctgtataactgtgtgtgggtgtgtgtgggtgtgtgtgtatatatacacatacatatatgtatgtgtgtatatgtgtatgtatacacatatatatacgtatatacacacccacccacacacacccacacacactgcactccagcctgggcgatagagcaagactccatctcaaaaaatatatataatataaatatatattatatacgtaactatattcatgcatatatattttgagctcatatatattcatacatatattcacatatatatatatatatatatatatatatatatatatatatttatttatttatttatttattttatgatggagtcttgctctgtcgcccaggctggagtgagtgcagtagtgtgatcttggctcactgcatcctccgcctcccagattcaagcgattctcctgcctcagcctccaaagtagctgggattacaggcgcctgccaccacgcccagataagttttttgtatttctagtagagatggggtttctccatgttggccaggctgatctcaaactcttgacctcaagcaatccacccactttggccgcccaaagtgctgggattacaggtgtgagccaccgcgcccagtctacctgtatgttaaagcaaatccagcagcaaagaaatctgttcagctttgtttaaacccatcagttcctaagtttatttaaccagggcctctcttctcaaagcattcttttctttctcaaaggacaaagattggtaaatactagtttaacttctaattaaagttggctgggtgaaacataagtgaagccttaatatgtgtgggctgcagaatttatcttttttttttttaatccacatggcaaaaatcatataggggttctgagtggtaacttagtttccctgcatgtctagtatcagaattttgaaaaacattgtgaggactgagagttacctaaataataactttaaaaaatagctggttttgctcctataaagaagactgagcctatattaaaagattatcaagaatcgtcttgaaaatctaggcataagtgtgcacctgtagtcccagttacttgggaggctgaggtaggaggatcgcttgagtctaggagttcgaggctgtagggtgccatggtcatacctgtgaatagccactgcactccactctgggcaatataatgagattacatacctgaaaaaataaaacatgttagttttcttctaacctgtggcttttgtccaactggagtcctttccctagcaaaaaggcaaaattgaaaataattgtgatggcagtggaggaccagtgaataacatatttgtattatcaagggaatagctcttaaataacaggacagacacattagagccctttagaaagggagcaaagatatgagattatcaaattatgaaatgtgttatatatgaatatactagggagtacctttccctgcacccatggtgcagtataagtcttcaggcatgaaacatatatttgttaatggactattccgggatgacttttaaatatttacactgaataaatacctgtatctggttggcccatgtcctagctgctgaatattcaggaaagaataagggatggctcctgaccttgagaagcttagatttctggtgaaagtagctttctcagtgcaattatactgtgagtggcatcttcttcctctctgggccctccccctggttcctgctccccactactattgccacagctgagtgtcaggctgaatgaatcatggagctatctgaggatggcagtacttacattactttattacgttgtaaaatacttcctgataagaacatactagtggttttttgagtgtctggaaacattgtaaacctgtcaaataattctaaagattccgctgttaacatcagcttaaagatttgttagtaacgtaacttgccaaattccttgccccatcacagtggtctccctaattaaaaaaaaaaagtaattaaaggttgagatttaatgaattttacttactaaattttctctgaagccagagacttgaacataatgaaataattgttcatttttcaaaaccataatatttttgtccttttaaagtagaaatggatggtagaaattgtagaagctgaataaatttggtgacaactttgtttttgagtttgtttaaacatttaagtgcttaaaaatgggtgcaaattttcttgtcttttttttttttttggcagggaatctcgctctgtcacccagactggagtgcagtggtgccatctctgttcactgcagcctccgcctcctgggttcaagcgattcttcttcctcagactcccaagtagctgggattacaggcacacactactatacctggctaattttgtatttttagtggagacagggtttcaccatgttggccaggctggttttgaactcctgacttcaagtgatctgcctgcctcggcctcccaaagtgctgggattacaggtgtgagccactgcgtccagccttcattcagcatatgaaaattaaaaaaacataaaaaagggcagaaatgaattatgcagcgtgatttcattattgctctcaggaactggataatgctttaaggtaggactaatctgtttcaatgatgagacattttctcactatacatagcagttctggtcattagtgaaattactcagtaaatgttgaagaagaaggaaaaatgaaggtatccatcatgatcctaattaccaccaatgaaggtaattagggaaattactcagtaaatgttgttgaggaagaaggaaaaatgaaggtatccatccataactcaagatgatcccctatttagagaataagtatacattctacaggcatctaaggttttcatgtttctctgttctgtttggttttaatggtataatatacattaaaaattgtgcatcaaggattttatttcaggtatgtgctgcattgcttctctttatgtaataaattccttgttaactgacattgtttcccggggatttccgtatgttaacaagttctttctacagagatgattaatacttacggtgatcaccctgaggttccacaaaaccctcttgaatcatcagagatgacattctactcattgtaactttaatgccatgtatttattgtcttttaattgttttgaaagttgggcatctgtttgagatatttttttcttttggttataatgacccgtttcctgaacttttcaggtaagaaactataggatactatcatggaacctgttttctcctgtaccctggttttaaaaccagtggctggaattaagacatgtgttgagggaggaaaagggaaaagagaggagcctgaagggactgccacttttctctagcagtggaataaggagtacttcattgagctaagaataattaatgtggagtgttgaaagatcattctgtattttatgcacatgttccagataacagcataaggacctatgaaaagcaagaaaaaagttttctggggctgtcatctttgatcacatagagatggagtgtgtgttcatacaccagccattcctgtccgtccttgccaccactgacttagaccaggtgacacatgggccttagtatgaatgttgtaattggagaatctgcctcaattttgagctcaactccagtctgtagacttgctgatacagtagtatttgtctatcacagcacttagaaatgatagcctgtggtcaggtgccagtggttcacgcctgtctgtaatcccagcactttgggaggatcattggaggtcaggagttagacaccagcctggccaacatggtgaaaccctgtctctactaaaaatggaaaaattagctgggcatggtggtgggcgcctgtaatcccagctacttgggaggctgaggcatgagaattgcttgaacccgggaggcggagattgcagtgagctgagattgtgctactgcactccagcctgggcaatagagcgagacttgatctcaaagaaatggtagcctgtatcacattgttttatggctatatctctgtatcctgtatttaacttatagtcatgtggtgttatgaaaaaaagtaatcagtatatattgagcacttctttgtaccaagctaagtaatttggaaagacttgtttgtattttgacctggattcagattccacctctgctacatactggcttcatgacctcagtcaagttacttagcccatctgagcttcggtgtttgtttttttctgtatgacagttgtatgattctgctaggacagccatagccgagtaccacagactgggcagcttaaatagcagtcttattttctagtaattctggaggctagaagtctgagatcaaggtgttggcaggattggtttcctctgaggcacctctccttggcttgtaggtggctcttgtcacatggtcttacctctgtgcctgtatctttgtcctaatcttcttttcttttaaggagaccagtaatattggattagggcccaccctaatgacctcattttaacttaattacctccttaaagaccctatgttccctgtaatcctagcactttgggaggcccaggttggaagatcacttaagcccaggagtttgagaccagcctgggcaacaaggcgagacccctgtctctgtttaaacagaaaaaaagaatcccgtgtctgaatacagtcacattctggggggtaaggaattcaacatgagtacttgagggacatgtccagccgcctgtaacagcagtgaaaatgacatgtgctcaagtgggtttattttactttttaatttttgtgggtacacagtaggtatatatatttgtgggttatctgtaatattttgatacaggcatgcaatgtgtaataattacatcagggtaaatagggtatctatcacctgaggcatttttgttgttgttcttgcaaacaaatatactcttttattttaaaatgtatgattatttttgactatagtcaccctgttgtgccagcaaatactaggtggcacaatttttttgtacccattcaagtgttgtgttgttgtgaggattaaatgaaatagtatatgcatgtgagcttagtgcatgcataatgttagctttctccttgctagagcggggtagaatcttgttttctttatattctatccaagtataaacagtaaataaatgtcagtgaaattgtgttttaagtatgtaggtgccccttttcataattctcatcttcctcgcctccactcttgcaactaaattagtatttttttcttttcttgagatggagtcttgccttgtcaccaggctgtagtgcagtggtgctatctcggctcactgcaacctccacctcccaggttctagcgattttcctgcctcagcctcctgaatagctgggacaacaggcgtgcgccaccacgcccagctaatttttgtatttttagtagaggttgggtttcaccatgttgggcaggatggtcttgatctcttgacctcgggatctgccctcctcggcctcctaaagtgctgggattacaggcgtgagcaaccgcgccaggccctaaatgagtaatttaatgctaatttaaggggatctctcctgagaagttctctctacttctgctctctgcgcactgggacgtgccatctccacctttaaactgcgctaggcccttgttcccttcccagttggcaggattatctgagacttctctagataagagcagtggacttcagctccctctccctaggttccgtgtttccacctggcggtagtgtgtatctgccagttgacactttacatcacacagtttgtgatttttaggtctgctctgcctttctcctctctcctctctgcagttttttatcttttttttaagccacagttctacagacagatgggaagtttagagcaaggtaggataggcgagtgagaaagcaacatgagaaaaatgagtataggcttattgacttaatgttctagctcagacttgtaccacaggcctgtgccttgtggcgagtgaactgtaattcctctgaggatgtctctcttgaatgtttgacaaggcattagcaatcatctgtcgcccagggaattccaaacaaaaacagatgagtttaaaatcctagggtataaacggccacagaattgtttaacttgttgacttctaggggaaaatatgtattctacaaatgttattacagagtttttacaggcatttttattattaatgatgggaagcttcctggagcattctcttaagtctagtggggttactaaatgtagttttccaactggagcttggtttcctgaaagctattcttggtggggtggatgagtgcagctgtcgtatctcttagtatttcagtttgagtcattgggtgggcggaactgattagaattccaaaagcaatacatataggagttaggtggaactcttttggaattaagtaggaaagattttgacggaactcctgcattccagagtttagtggtaaaaagaacactttatgtacagagtatttgggtaaatgtcttctgcattttgctttagttttttctatgttggtagaagggacactttatattaagaagctgttacaatgtattgtcaagatagagttatttgaaaatatttaaaaatagcagatttcccttctaaacatgctgacttcttgtaggttaatgtgacgttactttcattaatgtacatatgtatgtatatattatcatgtcttcttttaaacactttacagagctttatagtaagttcacccagttcatcacaagttagaattttgctgcatcctatatgcctcacgggaagagacattatcttgtggaaagtggcttttgtgctaataaataaacatcccttggaatgttaccctccatagcaaaggggccatggaaggctctgtgttttaggattacagctgcccagagacagcttgggaaacagtgttatgttttacagcatctattagaaatcaactcgatgtacacttaaatattgtattctgagttataacacagcaaactgacattgtaatgttttccaatatgtgattttcattgttgccatgatgtcataaggatttaaaaacagttatctgtttttcgtgggcagaacttaaaacagtgttaaaaagcatgcactctgtgtaccaaaagccttaaagtggaatgatagggaatccctatggggtaaagagaagattcttgattctctaccttggttctttagaatgtgagtcaatacattaagaacctggactgctctgaaacagaggcacatttgagagctcctggaaacccctttataggattatttccttgtctttgttctttagtccttgatttgttgtcaagtgaagcttgagatatgtcttgcagccatttgagaagcagcacatctggttagaagcagagactggggaacctgattgcctgggtgagtcattcctggctctgccactccagctttgtgatctcaggcaagttacctctctctgccccagtttcctcagctgtaaaatgggataataataatattcataagatagttgtgataatgaaatgagttaataaatgtaaggcaatttaggatagtgcctggcacatagttagccctgtataaaaatgttgactcttattatcttggtacatgttaaattcctatatttgaccatgttcagaccaagttgatatccacttccatttgttccacattcctgacctaatttgtcttggggtctccagccaaaatctaagattccccaggctaggcaagcatgaactcttgttcttagtggaatctgtgtggcagaatttatttctgcaggtatccaatgttgttggatgggtttggtttgcctgtaagagtgtgcaggtggaaaacatgacctgggtttgtgtctgtagggtttaaagtatgtgtttaggacaagggttatataaggacaattttgaagtcaaagttttaatctctttttcttcccctcaggtttctttattctataacatatttacttatttattataacctttagggctcagcctctttatttcctgtgactttgtttatttcatgagagggtgaccacccaggatttacaaagcttcttgtgtgttgtggaagatagtataaaattcaaataatgcttttacctgagcactagtgtgtgtttcgtttcttccttgaacttgcttaaagaggtaagcaagattacctcttggggcaaagattcttggcagagatgagaagaacattttttcattgacagagtctcaacaggacccccagctgacatagaaacacttgttttgctgtcttctccatgctgatcctttgccacagccctttcctccttgatgtatttttttttttttttgagacggagtttcgcccttttgtccaggttggagtgcagtggcatgatctgggctcactgcaacctctgtcttccagtttcaagtgattctactgcctcaggagtactctacttctgagtagctgggattataggctctcgccaccacgcctggctaatttttgtatttttagtagagacggggtttcaccatgttggccaggctggtcttgaactcctgacctcgtgatccactcgcctcggccccccaaagtgctgggattacaggcgtgagccaccgcaccggcctgatggtcattaagtgccctcagcattctcactcctggagtccaggcctaaagcttgcatccctcctcctggccagtccccagcctttagaaataaataggctttaaatgagttctgctgtttgctgttctgccctaggctgaggctaatggaggtggtctgtctgcatgagcagagctgtgtgtgagaggctgctaggagaaagcaatacctgttgtcttaggggccagcttcaggggccagtgacagttaagactcttcctcagagctgcattaggggcctatcaagccttgctctcacatatgcagaataagcaccttgtagcctggcctggtaggagaaaggtgattattgtcagtacccctggtccttgtttccttttcacccagaaggcagagtgggtatatggaaagatcacaggctttttggctacgctgacctggttttgaattctggctctgccactcagcctattagtacaaataaataatgcacactgagtcttagtttcctcctccctaggcatgggggctctaaatccttttgcacagaattatggtataaaacagcatgtatgcagcacatctggatagtggcaggctctgatgatgataataatatcactaatactgatagaatgcttactatataccagatattgtcatgagatataatgtatgttatttgacccttcccacaacaacatctccgttttacacactaggaaactgaggcatagaaaagttccgtaagctggctatgatggcaccgagcacaaagcccagatttaaatccaggctccgaaaagttagctccacagtttttcagatggagaattttttgagatttctaagacttttgataatataaaataccactacttgcaatcatttatggcctcctcgtaatcattaacttgtagctggtgtatttatcttgtgtagacctgctagtggcaacagatacaacctactgctaatgaggaaattgcccttttgcgaatgaatgatggaaaaaaaaattctaagacggagtcttgctctgtcgcccaggctggagtgcagtggtgtgatctcggctcactgcaacctctgcctcctgggttcaagcaattctcctgcctcagactcctgagtagctggaattacaggaacgcgtcaccacacccagctaatttttgtatttttagtagagatgtggttttaccatgttggccaggctggtctcgaaaggctgatctcaagtgatccacccaccttggcctcccaaagtgccaggattacaggcatgagctaccgtgcccagcctgagtgatagaattttaatacttgttctggttcaatgtgaagcatatttctcccttcagagacttacctgtggggctcccccaagacagcaagctgactagaaatcattgttctagaacttttgataaatgtgcacaagagagactctcctattccctttgtttccttgcccatgtgacttgaagctctgctgcttctgttgggtgaaggtttgatagggaacagctgcctcgctcatggggcagcattgggagcttagtgcactgggacttgtatcgcagcatggacttcaccttgcctgttggaggctgagacagcaaaatgcagttcgtccagatgctgtgaagagtttcgaggactttcgttaggacgatagtactatggtaaaagctttggggtgggctctgtcctacgagagagcgtgtctttccttcctggtggcctgcagtgacattgacgctctggagataagtggctatattcatcactgatctgagcaacctatgactgggcgtgtcctggcagcagaaaataactgctatgctgatagctgttacagtcagttttcttcttggacataaatttacattaatgttaaactgttttaaggtgcatatgcatgatttgcgtttcagctatgtatctctggccttttaccattaggaaatttggttttctgtctttgctaattgaactagagtctgtgtggctggatagaatcgtctgggtagggtgtgattttctttttttttttttttagacggagtctcactctgtcacccaggctggagtgcagtggcgcgatttcggctcactgcaagctccacctcccgggttcacgccattctcctgactcagcctccctagtagctgggactacaggcacccgccaccatgcctggctaatttttttgtattttttgggtagagatggggtttcactgtgttagccaggatggtctccatctcatgacctcctgatctgcctgcctcccagagtgctgggattacaggcgtgagccaccacacctggccgggtagggtgtaatttccaaagttgacctcacgttgaacctaaggcttaaagatataaccttcctgtcagacggtcagatctcttaacactggatcacactgactgacctttaagggtgactcatgtctgtgtcatttccagcagcatctttagtatacctctggagggatagtttccttctctaagtagtaaaaggtgaaccaggaggtgttgggggagtggactctgcttttcatttctttgaataatatacatgaaattatacattgtggtccttattgtgccatcaattttgtgtttttaataatccaagtttctaaagacactctttcctatagatggggagataaaacttgaggaattggaatcctcatgctagaaaggcacgttgcaggtccagccagtgtgtagttactgttcattagtctatgcatggcactcaactagatgacatgaggatccagacaagtcttgctttctgccttcaagttgcttatactttaggtggaggtatcagtgatgtaaaaactacatgggtttgtgacaggggagatcctgctagaagtgtcggtttagcgctgagaggagcaaaatgatttgaaatagatggcattttttcatgcctgctcagacaggatttttgcatgtgtgtgaatttcctcacctttgaaagagtgggtgctgcctgttgtatgatagatgtctgacataaaatgcctctttttgcccctcatatcacgtggcctagtgtaattggggggttattctgggaaaacaattagatatgcattgtgtttacagtgtgctacaactctttaacctgggacataacttaccgagatctgccatgacatgagccgctttctcacagtcctgttggagacctgcctgccaagggcacagagcattaaatggtgggcaaaagttatgctaactgaagtctgttttgtcttagggtctttcacagccctttttcatatttcagttttgttaaagccctagagcagggatgagaaatttgtagtaaatatgcacgtgttctctccctcataccccaagaagctgctcataggggtgttgctaatcaaaatgtcctattcctgcctgggtatagccttagagtatttcttaacacatgattcctggatgtcgctcctttttgctccaaactggcacattttataaaatctgtttgtaatctcctttgcagtgttatcctcttgctccatttcattttaataagtgttgagtgagtggtacagggaatgaattctgttggaggccaaaaaataagaacacttagaatgaccagtaaagagtttatggtggaaggacttaaactttaatttgaagggtagataggatttaggtaggtggcggggaggaagctgtcctgtgaactaaggtactgaaaaggaaagtagaaatcatgacgtgggaatagcgaatatgtgtttggtagatgtggagggtttcttccgggcagtggttcccagggtttgtgtgtatcagtcatctgctggactgcatcttcagtttccatttcagtaggtcctgtggtagcgccctggaatttgcatttctagcaggttcccaggtgatgctgatgttgctggttcaggggctgcacgtgagaaccactgctgtggggagcatgtaagctgcggccagaggagtcatgctggagcagaggtggagggtaggacagcctggcacccacctccagggaccactcttggcaggtgtgcactgcgttgtgacttgtatgaagcagtggccctgggcccagggatcttgagtaccagcctaaggagctggcactctctttaggcagtgggaagccattgacaaattttgatcaggagaatattattggcatctcctttcagttaatttggtagatggggaagggtcctgaggggggaaagcaagctgtagcatagtgcagtgtcccccagatggattatctcaggagtgcatttgggagagagaattggaaggctggatgttcagtgaggaaggtaaggaagagagaagaatgcaaaggtgacccaacatttccttcagtttgggagtctggggagtggtgatcacattgacagaaaggggaagtcagagcaagagcacaaatgatcagttactttaaaactgagtttaagttattttcttccaaagatgattgcctatcctgttttcagaagggtctatgaatgtaccatgccttttgttttgtctgtaatgtttaagcttttcatgattctaaatatgtaatctgttgaccctgaaatttcctcttattctgaggtttaaatggaagaatgttgtttaaaaatgcactaagccatttcactgtaattttccctagacacttacacccttatagtcttgcccgagtatgagtgggacaatgtcacttttgctcttcgtacataagccttgttacatgggattgcagtatctttaatttttctggaagttactaatttctaattatctgaacattatgaacacttacagatttgtttatttcagttttcccctcattttcaaagtaatatgtgctcattgtagaaaagttggaacataattataaaattaaaaatctgtgagctacccataaattactcctttgatggctgcactcgtttcacttccccttttctgtggctgtgggtggatctgggagcagagctggtcccgtgtctggatcagggccgaggctcagcatgccagtgtgtggagttaggtgacagattctgccctacctctcctctcctacccagtatctagctacaccccaactttgcatgcggtcacattactgggagtgacagtagccccgctaagggtgaaacaaaatggtaccatagtggaggagggagcccggtcagcaggcttgaaggaaagagggcagtgtttatagaggtgatgaaatgctgtgctcagcttggtctcatttgcgtgtctttttgagactttagggccttgggaagaaggagactaggaaaaaaaagactgaactgtattatcagtgcagggagcaggcagccctgttgtgggattcccctcttctcctttgcatggagagggacttgagaaggggaagtcacttgcctatccagagagaaggaaatacccaggtcataacaagcctgcctcatcttgtgggtggtataagcagggcagcagccatggggtgacagaaaaggcaagtagtaacagaacttgagacacagcagggtgagcaggtacctaaaggagtgctgccggcatggcatcctctgagagcaagtccacctagggtggactgggccaagggaagatgcctcactaggctggtatcatcaattttgtgtgggttaagccatttgtcctccacctcccacttttgggagaatgagagaagacgctccagagaatgagagaagacgcaagggctcagatttgcatttgatggtgggaaacttaaccctatagatttagggagtaactgttagtgacctaacctaggactactggcggggccgggcaaggtgattcacgcctgtaataccagcatttcgggaggctgaggcgggcggatcacgaggtcaagagatcgagaccattctggctaacatggtgaaaccccgtctctactaaaaaatacaaaatttagctgtgcctgtagtcccagctactcaagaggctgaggcaggagaatcacttgaacccgggaggtgggggttgcagtgagctaagattgtgccagaaactattgggggataggtaggtgtggcaaccgtttaatttttgaccaaactgggacatgatttcatatttacattgggctggacctggcaagccaggatgtaggctcaccctacatatggggaatatgcaagtcatatatacacatttaaaaatacggggagctacttttacatcttaaataccgccttgtcaagaccctcaactatgttcatactatgacatttttgttttgttctccatttttaaaaaagggtatagtagtccttattatgactatgttgccatactaaatgttttactaagaatatcgttaatggctaagtgtttcaccttctaaatgtaccagttttctttcatttttttcttttcttttcttttttttttttttttgagacagtcttgctctgtcgcccaggctggagtgcagtggcgcaatctcggcttagttttctttattaattgcatacaattactaatctagatttctttccagctatttgttattataagtgatagcaaagtacatctttacgcgtcagtatttccatagttaaattcttagtcagatttgtataattcttgatacatattgctaaactctaggtatctattttaaatctgagtttccacattggaaaactgacagttgagtttcattgatttctgaaatacggtaaaataagtggcttttaaaaagtcgctgaatagttttaccgcttagtatgtctcttgtgaccttgccttgcaaaggggtaatatagcaaagtaacaacttgaatgaagagaacagttttattgctagtgcagcatttgccacattgccataaggtgaatgtcctgcagagagactgaatcatactgaatttaattgtggtgggtgtgtggggtttaggcatacaaatacttgactctgaaaattgacagtttggcacagtatggttgaaagatcatgtattgggcgtgttgaactacgttgagttttcatgaggagcaagactctatgtctttgaagttgtgtagtgtcatggagtgctggtggcattttccacatggcatatgcgttttattatcagcatgaaattaatacattttcaggagtgggttcttccggtatgagtcatttactagttagagaatactttgtggaaacagttgtcagcagaaagagtcgtcttaacatcagcaagaactaaagctgagaaatctgctttgtgagaactgtgtacatcgctgggtcaaatgacctgaaggtgttttgtaaagccctgtgtggtaatcggttcagtcactgctaatatctaaatgcagcatgccagtcctgagatgcagggactggcatgctgcatttatatattagcagtctgagatgcccagtactgactgtggtacaacttgttctgaggggtcagaccagtttgcaaacaggaaagaagagacttctggaaaatttatgtgtgtaaagacttcctggttagtttgacagcattcctgagttattcacagctcagctagtctctaaagactccaaagacccaggaaaaattttcatatatatataaaaacaacataaaatatatataacatatattacgtattatatataatatataaattatataatatataaaattatatattatataaattatatataatatattaaattatatattatataaattatatatattatataaattatatactatatgttaaattatatatataaattatatactatatgttaaattatatatattatataaattatgtgttaaattatatattatgtaaattatatgttaaattatatattatataatttatataacacacattaaattatatattgtataatttatataacacattaaattatatattgtataatttatataacacattaaattatgtattgtataatttatataacacacattaaattatgtattgtataatttatataacacacattaaattatgtattgtataatttatataacacacattaaattatgtattgtataatttatatagcacacattaaattatgtattgtataatttatatagcacacattaaattatgtattgtataatttatatagcacacattaaattatgtattgtataatttatatagcacacattaaattatgtattgtataatttatatagcacacattaaattatgtattgtataatttatagaacacacattaaattatgtattgtataatttatagaacacacattaaattgtgtattgtataatttatagaacacattaaattgtgtattgtataatttatagaacacattaaattgtgtattgtataatttatagaacacattaaattgtgtattgtataatttatagaacacattaaattgtgtattgtataatttatagaacacattaaattatgtattgtataatttatagaacacattaaattatgtattgtataatttatagaacacattaaattattatatttatataacacacattaaattatgtattatatttatataacacattaaattgtgtattatatttatataacacacattaaattgtgtattatatttatataacacacattaaattgtgtattatatttatataacacacattaaattgtgtattatatttatataacacacattattatataatttatataacacattaaattattatataattatataacacacattaaattatatattatatattttacataacattaaattgtgtattatataatttacataacattaaattgtgtattatataatttacataacattaaattgtgtattatatattttacataacattaaattgtgtattatatattttacataacattaaattgtgtattatataatttacataacattaaattgtgtattatataatttacataacattaaattatataatttacataacattaaattttatattacataatttacataacattaaattatatataatttataaattatataatacatattaaattatatataatttataaattatataatataaagttatatataatttttaaattacataatatataagttatatatgatatatattatataatttatatttatatatatatttaatttatatataatatatactgcaaaatatatataatataaaacatatattttatagtatatattatatatattatgcaatttataaaatatatattataaatatatattatatatttaaaatagaataaatatatattatatattataaatataaaatatatattataaaatatatattatatattataaatataaaatatatattataaaatatatattataaatataatatattataaaatatatattataaatatatattataaaatgtatattataaatataatatattataaaatatatattataatataatatattataaaatatatattataaatatatattataaaatatatattataaatatattataaaatatatattataaatatattataaaatatatattataaatataatatattataaaatatatgttataaaatataaaacatgttataaaatatattatgaaatatgttatattttaaaatatatattatgaaatatatgttatatattataaaatatatgtaatatatatatgcagttgattccaagatgatgaaatgtatggacgactattttctaaaaaaaaaaaaaaaaagaataacatctaagctaaagggaaagaacagctctgaatattgacttgtttagctttcattagtacttaacattgaaacagagtttttgaatgttcaggcatcactaaatctaaaaataaaatcacaaggctgtagttttgcttttagatttcccagttttcaagtgatggcttgttgtgttttatttcttctgttgtgtctccaatccagtgctccatttttgcttctttctgttctctggtcccggatttgacatgtattggtacagattcccagttgctttcaaaaggtgccttgagaactttaggcataagtgaaagctgtattgtgcccgtcagatcaatagtgtgtaacttttagaacacaaatattgcaaagataatgtttatgataccataagtcctgccatgaattccctgagcatcccatgggtgtatgtatatgatatctaggacataaatgacatgtagtttatgctttcaaacagaagtcatccagacaaccttccctccccctacaacattatcatgtctgagctcttttttcttaaaatgaaaatactaagctgcttgaagaaatgtactgctaagaggacaggcatttgattttcactctgtcattgttagctgtgactttggccaattagtgtggattttcagcaattatttcatataaggaagattgtactctgagattttaatataatagatttctaaataattataaaggcatagctcatagttgacttaagtgatgctcattttctttatcctttagataggcaaaccactccctattttcataatttgtcaccaaatacatttttcaagtctctagtagtgaaaaactgagtgtattaactccttttacaggtcaaacttctttctgatttcgggaaaattgagatttgtgtgtttattgacaagaatttttctgaggtagattgttgaaaagctgttggtttcctaatttccaggtgcatggttgcttttttggttaaaagtaagacagggggagaccctgggctgaggagctgtgaaatctctaaagaggtctgtgaagtaggttattaagaggaagtaaccttattagctggtagctggagagcctggaagcctctcttaagcagctgcatcatatccaagaactgatttgcattcatgttactatgaaaacagatcaaattgtgtctctaaatgtgtttgttttgtgaatctggaaacaacaacattcaggttatgtgaccacctgagtaactgcccggtgagactgggaagtctaggagcctgctgcggcatcctgaaaagcagcttagttcttagcaatggcagggagaagtggcgtgagtctcaaaatctgtaggaaggattttctttttccgctttttcattgatctctttcccttaacccagatactttcccatctgcaggagcaaaaggggggaaaattccatgaaacgttgagtttcaatgtacagcagtaggaaaaaagttttaatgtttcaaaggataatggaggataaatggtaacttaaagcattggtaaatattatgcaggtcgtgcatatgggatggcatacatatgggatggcatagattagtttttgtgttggaatttattcaacagtgattactatcttgaacctgtaagacctgttaaagctatttgagggtatgggtggaggaaaggtgggttacagaaatgagtctgtattcagcctgtgctgtctttcctcctgccctttctttgttcaacactccctgctccacagttctctgctgtcctcactcttgtgacagtggccttctccagggtcacacctctgacctccctggactcagtttagaggatgcttttcatttcttatctccacctcttgggagcatgtgatatgttgtcagtcacttttttgttcctgaagtgctttcttctctattgtgaagggacctggagtgctcggcctgtgtgctgaagaatgtgcagctcttctcactagtcatatctcctcagcagatgaccaaggtggaagctagaagatcagggttgtcacataatcgggtgctggaggctttagaagcaaggagggtattttcagtgggaggatcaggtgtgacattctggtagaagtagtatttatttatttattttttcttttccttgggatttgagatgcacttggcacagtgagggctcaatatttgaatgaataaaggcagggttgaaacacacagatgagggaggagtattttcggtttaggaaacacatgaacacaacatcagcagggggagaagatgaagctcatgaaggtgaaaatgaatcactctcttggctgagtggagtgatggaagcgggtgggggaggaggctcgcaaatgtgttcttgccagactgtggaaggctgtgaggatcagctaaggaatctgggggactctgggcaggagaggtggttggaattgggaaaactaatctggcagcagtttgttgagtcagatgggattagaatgagaaaaacctcattttggtctcagctctggaggggaccaaagtctgagcccactgccttcgtgcttccctggctcagccctcacaaccaattcccctgttgtccttctcatttcacctggccacctggtgccatgaccagtgaccactgaatcctgtcgccttgtgtgcacagcctatggagtagtaacagaacctcatctttggaagtcatgatgcctggggggaagacagcagcagcgtgactggagttaatgtgaggcacccgacccgtgagggttagagggtctgtgacttagaaagtgaataaggagggtacctttgataggattaggaataaggggcttaaggcaaaatcagggctaagaatttaaaacccaaatagttcccggatgtgaaaaaacttcgtgagaatttactttaggatttatcatcggttcctctccacatctcttttccttatatccacaaaccaaacacacccctgccgttccacatggacaccataaatagctccttttaaaaaatttgatttgtttttttttaaaaagcgtttctgaagggccaggcatggtggcttgcacgtgtaatcccagcactttgggaggcctaggtggatggatcacgaggttaggagtttgagaccagcctgaccaacatggtgaaaccctgtctctattaaaaataaaaaaaaattagccaggtgtggtggcatgcgcctgtaatctcagctactcaggaggctgggacaggagaattgcttgaacctgggagacggaggttgcagtgagctgagatcacgccattgcacttcagcctgggtgacagagcaagactccttctcaaaaagaaaaaaaaaagtgcttctgaggtccagtgaaggtatgaaggaaaacttgtgaaagcacttttgtttgtccagtccttggtgagattaggggtgagaccaagggtaaggagatcagcacatggggctgggaagggcaggttcctccattaacctctaccagcctgctctgctcctttttacacatttgcggtatttggtgtgtagaatttgcacagtgggttataaacagtctgattatctcaaatgatatccatgcttgatctctcttgttggtaaaaatggggaacaatattcttgaggtatttgctgagagctctaattatcagtactttagcagattcccatgacaccaggaaatctagatattttcacatgcttgagaaaacattcatgctttattaagctacaagctgtacagcaacatctggaaagtcactcagatggaataaaaccaggttttggttgaaacatcagttaatattatgaaagaattataaacatgatgttcatgccataaacttatccggttcttgcagcagcagctctcttcagctaatgaaattttcacagaactgatgatatcactgaaaactgcaaggtggtgactgcttttgtgagtgtgacctcccctcttagcgtctcccactgtctttgggagtgagcactggggaaggaggctatttttgtgaacactatctgctgctttccattcagtcgtggagaagtcaattcaactgtaagcttaagttcagcatggcataattattatctaagcaatatttcatcaaggtgcatttctatttaagtgggctgagggccacttggttgtgttttccacatattttatttatgtttgagtcagagtctcactctgtcaccaaggctggtgtgcagtggcacgatctcagctcactgctacctctgcctccccggttcaagcgattcttgagcttcagcctcctgggtagctcgtattacaggcatgtgccaccatgcttagctaatttttttgtatttttagtagagatagggtttcactctgttgaccaggctggtcttgaactcctggcctcggcctcccaaagtgctgattacaggcgtgagccaccatgcccggcccacatgttttaaatgacatattttaaatgacattcctaactaatgcaatattctgatttagaaactgaagacactttggccacctggccaaatctcacattttagatagttttcaggtaaatggagactaactggcctgcccagtgcacacagctaggtggtatcagaactctgaccttttgtattttcacttcctatttgggtctttaccaaataagcaaagcttcatctgtaaaacagatggaagtcattaaaaatcagagcattcctgttggtccagggagacaggatgcagatgatgtgtgggagtctcatcagctccccaaggcagggatttatgagggctcacatcggaacctttcctattagcaattaagaaggtgtgttcgtaatgaacagaaaggtgtgttggtgtgtggatttttttttttttttttttttttttaaatcctagtctcttagctcaggctgccataacaaaataccacagactgggtggctccaacaacagacatttagttctcacagttctggaggctgggaagtccaagatcaaggtgctggtatattcggtatctggtgagggcccacttcctgacttgcacgccaccttcttgctgtgtcctcacttgggacacgggaagagagaaagagaaaacacatgcttgagtctccttctcttacaataattccataaggtgggcttcacctttgtgacctcatctaaacttaatcaactcccagaggtgccacctcacatgggggttagtgtttcaacatatgaattttgggggaaacgcaaacattcagttcgtaacacctagtaatacctttaaaaaatgggctgtctggcagaaagtatgttctcaattgttgagaagatccagtgtatcagtaattattattcatactctcaaatattctaagatgtaacaaaacatttgaaaatattcagaggtgactagattaataattcgacttttttctacctgcttgtccagttcattaagcaaatatttacttgagcacctcttatgagtcaggccctgtgctagattctgtgccaaagggataataaaaacctgagctagagtagcccacatttggtggccaatgttaaagttatatgctgttattttctaactatcatattcaaataagttttatcaagtttccttctggtcgtgtctttccttttggatgaaatattgtaaacatagtacatagagaatactatactgaatacttcagtacttgcatttggccttatcagattttaatatttgaaggaaacaagtcaaaatattttttaatataagtaaatctctgtgagagttgaaggctcctgtgacccctcctcatcctgtgtccttaccattctataagtaaccactattgtggatttgggatgtctcattgccacatatgtttttatatgtgtacatattatacatattatatatgtatgagtttatgagtaatgtaaggtatattgttttgaaactttatgaaaataacagcaaactgtacatattctttactttttttttttttttttgagacagagtctctctttgtcaccaaggctggagtgcagtggtgcgatctcagctcactgcagcctctgtgtcccaggttcaagtgattctcctgcctcggcctcctgagtagctgggattacaagcgcctgccaccatgtctggctaatttttgtatttttagcagagacagggttttgctatgttggccaggctggtctcaaactcctagcctcaggtgatctgcctgcctcagcctcccgaagtgctgagattacaggcatgagccactgcgcccggcctcttctgtactttaggaggaaaaaaagccacattattttttcctttttgctacattctgtagttcttttttaaaaacctaacatatagcattccattgaatggttattccgtgtgtgtgtgtgcgcgcgcgtgcgtgcgcgcgtgtatatatatatattttgtttgtttgtttgtttgttttttgtttttcctccctgcggggcatggagttgcccaggctggagtacagtggtgcaatctcagctccctgtaacttccgcctcctgggttccagcgattctccagcctcagcctcccgagtagctgagattataggcacccgccaccatgtccagctagtttttgtatttttagtagagatggggtttcactgtgttggccaggctcgtctcgaactcctgacctcaggtgatccacctgccttggcctctcaaagtgctgggattacaggcatgagccatcgtgcccagcctgtcctacagtgtcttagtctgttctgttgtcagatatttttggagtgtttccaaattttcattaatgtaaatagcactgctggtgaacattcttatacatgtctcctgacgcgtgtatgatgtgtatgtgcgtttctctggggacatcacgtgagagtagaattgctgtgtggtagcacgtgagcgtctttcactccagggttgtcttcacctttactcgatagtacacattgctttacacagtagtcagattacattccctctgcattgtactggtgattttgttgagctgcatcttttccagtattttgtattgtgaaacttttgagtttttgctcatctgttgatgtaaaagtgataccttattgtttctaacttgaatgctgcattttcctgattggagtgaggttgaatatcttttcacgtatttattggcctttcaggctttttctttttgagctgcctatttataacatgtcctcttccttccctccttctttattggtgacagggactcaggttcagagaagtagattaatcataatccttgattcacaacccattattatcatttgtgtttgcatggcccttttatttgctttatttataatataatgaacacctacgagctcatcaggttctgagacattaccaacaacttcctgtgcttctcctcactccgtctctcggcctcttccctctttatatatgctacctgagctttattattccttatctagttctctttgtggtcctctggggccttgcttttcttattctccattattatgatttatccaagttgttgtgttggctttggtctcattcctgttcttttgtagtgtctgctctgttttgcttatgggggatttttttcttttgtgtttttagtttcactctgtgaactccttttcagctgagctttctctgtaggagtcctggggaatgtgggttgaaggtgtattaaaaatacaaggtagttggccaggcgaggtggctcactcctgtaatcccagcactttgggaggccgaggcaggcggatcacttgatgtcaccagcctggctaacatggtgaaacccgtctccactaaaaatacaaaaattagctgggtgtggtgatgcatgcctgtagtcccagctactctggaggctgaggcaggagaatcacttgaacctgggaggtggaggttgcagtgagccaagagattgcaccactgcactccagcctgggcgacagagtgagactctctggaaaaaaagaaaatgtgtgtgtatgtatgtgtgtgtgtgtgtgcatatatgtgtgtgtgtgtgtatatgtgtgtatatatgtatatatgtgtgtgtgtatatatatgtatggtaggtgtttcagttcacaaaatacttagcaatattggggtaaaatataacacacacatatatatatatatatttttttttttttacaaatgtacagttgtgattataaattctggaaagaatacccaggatgtgccagtgaagaaagaacagaatttcagagcaatatcttaggagttgaacttgcatcagagtgagaaacaaaatgcctggagccttaacagttatatctagaaaaagaatggggccttgaaaggaggagttggacctgggatctccccgcatagctatttagccaaaaatacaaagaagtttgtccatctcagcctggactcagagtagggaataaaagtactcagatcccctcctaaaatgagaaagtatcagcctgccctcacttctgaggcttcatgtgtatactgctcaactgtccaggaatcaccaagtcagggagttaacataatgcggagccatggatcctcctctgctgaggcgccttgcagaaacaaatcatccgtgcctgtgtacgtgccttcccccttaacagtaagcttcttgacctttgtacattgatacgtatttgtggaatgaagaagtgaacaagtagaaacacataggcattcttaacagaatctaaagttccacctgcaaagtaggttcagcaccttaaaaaataaagtgtagaagggacattattttgcccagtaaaatgtttaattttcaaacagttctactattcttaaaatgttctgcagatcacagactgcagtgattgagtagcctgctgttgtgtgtgttgtgaaggatacaaagactgccaagtgttttacccttcgggagctgtaagtgtaggggagggacaggctcgaacacaaataattatggtggaaagtgcaaagtaagtgccacaggaaatttacagagcggttatggttttgcagaggttgtgagtgattcatttcacttcagaaatttgttcattgagagaacacttagtagagcttcttgtgttgtcagcattaggaggattataagaatacctaatatttattgtgcactcactcatgattaggcaggcaacattttatgtcaatctttgcaacataatgttaattctcacaacattcctatgaagaggatcctataattatctccatgaaattttttttattgaaatgtaccacatatatatgtgcacttttatgagtatacaactggttaggttttcatgagtcacattcaccagtgtaagtagcatccagagcaaaacagaacatatacacactcgacaagtgtcagggcttcaaagcccccaagaaccataatcttgacttctagtagcagattttttgggattggtttttgtgttttctggaaattgagttatatggtacatattttgttatgtttcatgctattgcatgtagtttgggattgttcattcccattgccattgagtattccattatctccattttacagatgaggaatgttgagactgagatgttaaagtagcccaggatcatgcagtaacaaacatgttacagtaccatttagtgttttttgaaacatgattttaatgttcttgtggtgttctatcatgtaagtataggacagtgtaaccagttccccttctgatagacatctaggtggtttccaacatgttatcactcatactttaccataaaaattcaatatttaaagtacgttttgaggtttccagctgcttttgcagttgactatagtcagttccatatagtgtggcagctagtgaaatattaatttcctttgtggctttctttgtaaggtagcagctgccggtcaagggtggcctttgtagtttttttccttagagacagggtctcactgtgtcacctacgctggagtgtagttacaccatcatagctcactgcagccttgaactcctggccttaagtaatcctcttgctttggcctcctgcagcgctgggattacaggtgtgagccaccatgctatgcccatttgagttttgatatgtaatctacttgccttttgaaagtgccttgtaagagtactactagtgtgtttacttttttaccttttatcctacgtttgtctttttatacctcctctccctttttcctacaaaacttcctgtaaggagatcttggttctgctgcagtcaaaaattatattttttccttgagggttagctctgctctttggcctgctaatgagtcttacagggtctctgtgggtccttcagaggagatatatttttacgaaacattctccggtgcagcagtttacaaacgcaacttctggagtgtgagctctttgaaggtaggagctgtgtagtattcacgtggtgcttggtacgtagtaggtgctcagtaaatgtgaggtgactggatgaggagctgctggagcctcagatttttatttattttttatttttttaatttaatttaatttttttttttttggagacagtctcactctgttgcccaggctggagtgctgtggcgtgatcttggctcactgtaacttctgcctcccagattcaagctattctcctgcctcagcctcccgaatagctgggattataagtgtgtaccaccacctccagctaatttttgtatttttagtaaagatggggtttcaccatattggacaagctggtctcaaactcctgacctcgtgatccgcccacctcggcctctcaaagtgctgggattacagacatgagccatcatgcccagcttccttttgattgacctttacaatattatgtttttttgcttttgggaacatgattaatttttagacttctcaaacagaaatagaagacctagagctatttgtttataatttcccccccttcttgtagtagaggaggaattatttagtaatgtgatagaaaataagtttataatagttttgtaaaaatattaagtttcttctattttctccattcattgaacatttgttgaaaccttgctgggtcccatgcaatagggatagaaagatgaatataattaatccttgcccttggggaatatataatctagtgggagagacaaacacacgtgtacttacccattgtggtaaaatatatttatatatctgtgagcattttttttaaaagcgtagtggaaggagacacctgggaggttgggaggagggccctcctggaagagacaacaacggagcttcctcttagaggaggtacataattcctcctcagtctggtacccaaatactggttcatctctttttttccttatttctttttttttatttttcttttcttgagaaggagtctcactctgtcgcccatggctggaatgcagtggtgtcatctcggcttaactgcaagctccgcctcccaggttcaagcgattctcctgcctcagcctcccgagtagctgggatcacaggcgcctgccaccatgcccggctaattttttgtatttttagtagagacggggtttcaccgtgttaaccaggatggtctcaatctcctgaccttgtgatccacccgccttggcctcttaaagtgctgggattacaggcgtgagccactgcgcccggcctgttccttatttctggaatgctagtactggccatagttataacattctatgatttctaatgtaaaaacctcgttcttgtcttttccctcatgccatagagcccttccacggaggcttgttgattttagctctgaaatgattgtaggatgtagttttcctctttctcttcccttctctctgcttacattgctgtctccttggtttggaaggacagtgatggaaataatctttgtgtttgaagcatccggcctggagcatggcatatcatggggttcaaagttgttaaatcaaaaggaactgaatagcctgtaactggttttctctcctctagtggccttttcctttcatttaattctattcaatgtcctcaaagttattcaattttttttttcttttggtatcacttctgtgtttaaaattcttccatgactccttattaccctccagatgaagatccaacctcttagccaggtctttacactgaccccagcatgccttctatgttcctcacccttccactgccaccattttactgtgtgcatgtctggagttgtttgtttttctcatggtccaacgtaccctccccactttgttttgttttgttttgtttttgtttttttggagatgaagtaggctggagtgcagtggcactatttctgctcactgcagcctccgcctcccaggttcaagtgattctcctgcctcagcctctggagtagctgggactacaggtgcgcaccaccacacccagctaaattttgtatttttagtagagacggggtttcaccatgttggccaggatgatctcgatctcttgacctcgtgatctgcccgcctcagcctcccagagtgctgggattacaagcatgagccgttgcgcctggccagccaacacgcccggccccctccccattttttatttgtcacttcggtctgatgttttgagatccagtcttaaccctgcgaaaccttctctgcctttcccagaaagagttaattgtgccctctgctatgttccctgagggtctgtacagtcaatcttttttagtggcatcccatctcatctagctcatcccaccccaacccatcccatgccatctcatcccatccctctcctctttgtcctgtttccccatttcatctgtctcttacattttcctctgcatttctgattagatcgaggaccaagaattgtgactgatgcttctttgtcccctgttcaggtgtttcttaagtggcagatgaatagttcctccctgtactctcctgtaaacatactttttgcttttacatctcttcagttttgcttttacttttttttttttcgtaagggatacattctttcagtagctttatttaaatgtagtgtgtggaccgtttgttgtgaccttctttgaaattttctctgatcatggcagcccaaaatatcggtacctgcctctgaaccatcttcgttgtctctggctgtgttacttatacaacacctgctattattatttgtatttttgttttatatgtttcatccctccttagattataaactctgaagttagaggtcatcttatagacaattttgaatcttctgtgttaaaaaatataattttggccaggcgtggtggctcatgcctataatccctgcactttgggcagcctaggtgggtggatcacttgagtccaggagtttgtgaccagcctggccaacatgatgactttgggcagcctaggtgggtggatcacttgagtccaggagtttgtgaccagcctggccaacatgatgaaaccccgtctctactaaaaatacaaaagattagccttggctgggtgcagtggctcacgcctgtaatcccagcactttgggaggccaaggtggtgcattacgtgaggtcaggagtttgagacactctctctctctctctctctctctctctctctctcatatatatatatatatatatatatatatatatatagactttttacccccccacgcttgaaaaatgtgctacttcctttagtctccatggtttcagatgggaaatccattgttcgaattggtgttccttacagatcatgtatcatttctcacagcctgctttcaagcagatttttttctttgtctttagttttcagaagactagttattgatgtttaccattgatcctagccttggcctgaatttctttttgtccttttttttttctcttcgagatggagtctcactctgtcacccaggctggaatgcattggtgtgatgtcggctcactgcaacctctgcctcccgggttcaagcgattctcctgcctcagtctcctgagtagctgggactacaggcatgcatcagtatgcctggctaatttttgtatttttagtagagacgggatggggttttgccatgtttgccaggctggtcacaaactcctgacctcaagtgatctgcctgctttggccttcctaatgctgggatggcctctctttgtttattctgatcataaatttgctcagcttcttaaatctgtttatgtcttttaccaaatttggaatgttttcagccattatttctttgaatattcttttagccctattctctttttcctcttggggctcaatgatacaaggctggatgttttgctgttccacaggtctctgaggctctgcttattttcacagcctgttttctattgttctgatagagtgaattctgttgtctttcctcaagttcagtgattttttttatcctgtcattttcatcctactattgagcatatcaagtgagtttttgttactgtacttttcagttgtataatttatatttggtttttaaaataatttcacttctgagattttctagtttctcatttgtttcaacagaatttataattgattattgaagcacttgtaagagggttgctttaaaatcctcatcagataatttcaacatctgatttatctcagggttagggtcagttttttggctaaaatgggaatttgacttgggattttcctggttcttggtatggtgggtgatttttgactgtattctggacattttgcctatcttttttttgggggggtgcgggcagtgggaatgttctgaatcccatttaaatcttttgttttagcaggcagccacccagttagtcttagcacacaggtcctgccctacatttgtgggctgtggttccaatgacagtttaactttcagagcctttgtggtgtttgtctgcttggtggttagatgccgctagggctgccgtctcatttccccctgctgttattgctggctgtggaggcagaagggatttccctaggctgggctactaggtgtctcccagtgggggaaacgtagtctcaggaccctggagactgagggactttcctgactgtggcatagtcccccttcctgtgggggacagagagctcttgagccagacacttgttgagatggaatctctctacctgtgccccacggttttcctcatgtctgtgtgcaatggaagggcgtcttaggcccatgtgaccagagaggcttcctgggccaggtcacttgtggctggggagtcttgtgtctgccctattgcatatgtcgaggctcccctagttattgttggtggggctttaggttggtccttcttttggatggtgtaggacttatctgatgtgagggggactcgtgtttgatctgggtcataggaatgagcctacctgagctgccttttgttctcatgtcatgggttgggaaatggtgggtctgggtgaccactttgcatagggggatgcaagatactgtttcactgagctgttcttccatttttggggtcacaaactggtttgttttcttcttaccatctttcagagttctcctttggttatctcctctgctatttccagggtttatagcgcttagtagggaggagcagagagacatagttttctatgctgtcttgtgccttgtcattcattatttttttcctttttcttttttgacacagcgtcttactctgtcacccaggctggagtgcagtggcacaatcttgtctcactgcaacccacgcctcgtgggattaagtgattcttgtgcctcccaggtagctgggactacaggtgcctgacaccatgcctggctaatttttgtatatttagtagagacagcgtttcgccatgttggccaggctggtcttgaactcctggcctcaagtgatctgcccacctctgcatttgaaagtgctgagataacaggcgtgagccaccgtgcccagccttattcattcttagatgttggaattttaaaaagcaatgaaaaatgtcagcaaaatttagcatttatttttctacgttcagtaaaacatatctctcaggggtcttatggaggtaaggaaacatgagaaccagttaggttaaatgactggtcctggggctctattggtcgttaattacagaacacagactagagttagactcctcttaatgaatccactatttgtttctttgtagcaaactaagttgaagacttctctataagaaaagagaagagaaccattgctgtgctgtaatgctctgggctttataatgttaacacacaaaataatttatatatcaagtggaaaacctctcagaatacaggaaaagaatccagtgttcaattatattaagagtgaataacatgctgtgtttgttccaattttagtattcatcattttttgtaaagtgtaaaataacataccgtctgttttttactataaaacatttgaatggccttataaaatgtttcttgcaaaagaaagttctctcactggttatcatcaccatttgtattatacttcaaagagagtaaagaatataatgaaggttggtggcaccacccaagcgaattaatctcatagcttagcattatgtgggacttttcatcaggtcatcgctgtttactccacagacatcagatacctctcaaaatagttctccatgaagctttttttcctctgctgcagagatggagaaatggagaaacccagaagttaactgttaagttgtttgtaatgttttttgaagtccccagggattttacagaaaatggagccggagttgaactcatcccaaaactctttggatgtctgggatgggaggcattgatttctctccctgaggcacagcaagaactaggcagagtaaataggactaaacactggccctgtttaatgtcgcttgagtaatgatgcttgagtaatgatgactgacaggtcggaggagtggggcgtatgaggatggactgactctgtttttcttctttccatatggacttattccttttgcttctacttttgtttttccttcctgttccctacttaatagtcttgctgaaaaatatatctgacctgtattgaagaatggaattaaacatactgggttttggagaacttttcccatcactcatagtaaaactccaacataggtgatccataggctaaaatgagatgttcaggagttagggtgaagcttcttaaaaaagtgatagtgtgatgatggttgattttgcaaacttgttttctctaaagcataatatagctgagctatgatcctaaaggtaaggtggtaggtagtattaatgccagcaatgtactgactgtttactggctcagactcaaagactgttagcattgggcagggccccctttggaccatgtttgtagcctctctgtcctcagcagagtgtctctacaatataaatagtggtatttgtgtctcgtagttacttgtaatgaagcagcctgttgtattgcaggtggccagctctgcttcgcaggaaaccagctctgcctccctgtaacttctacttacactggttttttgttgggtctctaggaccatgcagggtgaatctaataattgttcttgttaatatctgtcaaaattcagaacagatgttgtgactttaccttctcaaagttgtttctcatcaatcttgaagactccttatcctgctgttttctgcatgttctgttttgccggtatcccttcaaaatgtggtcctccaaatgaaacatggtgcccccaaagttttggagaactcctttgctgtgtggaagtgcggactgtgacatgtaagggtttggggtctgtaaattctatttatcaacctctctccactttttttcccttagttttgtttattgctttttttttttgagatggagccttgctctgttgcccaggctggagggcagtggtgtgatcttggtacactgcaacctctgcctcctgggttcaagcgatgctcatgcctcagcctctcaagtaactgggattacaggtgtgcaccacaatgccaagctgatttttgtaattttagtagagatggggtttcaccgtgttggccaggctggtctcgaactcctggcctcaagtgattcacccgccttggcctcccaaagtgctgggattacaggcatgagccactgcatccagcctatttatttttctttttttattgatacataactgtacatgtttatgggatacatgtgatattttgatacatgcatacaatgtgtaatgatcaaatcagggtaattgggatatctattgcctcaaacatttatcatgtgctttgggaacatttcatatcttttcttgttattttgaaatgtttttaattatagtcagccttctgtactgtcaaacactagaagttattccttctgtctaactctgtttgtacccattagccaacctctttattgcccctctcccatgcttccctacctctggtaaccaccattcttctctctacctccatgaggtcaactttattggcccacacatttgagtgagaacatgtgatacttgtctttctgtgtgtggcttgttttacttaatataatgacctccagttccatccatgttgctgtaaattacagcattttattcttttctgtggctgaatagtattccattatatctatctatagaccatgttttctttatccattcatccattgatggacacttaagttaattctatgttttggctgttgtgactactgctgtagtaaacatgaggtgtgcaggtttccctttgatatgctgattttctttgccttggataaatattcgatagtgggaatgctggatcatatggtagttgtatttttagttttttttttttttttctttcaggttcaggggtacatgtgcaggtttgttatataggtaaactgtgtgtcacgggggtttggtgtacagattattttgtcatccaggtaataagcatggtacccaataggtagtttgtttttgatcctcaccctcctcctaccctccaccctcaagtagccccccaggtctgttgttcccttctttgtgtccatgtgtagtcagtgtttagcttccacatataactgagagcatgctatatttggttttatgttcctgcatttgcttaggataatggcctgcagctccatccatgttgctgcaaaggacatgatggtgttcttttttttatggccatatattattccatggtgtatatgtaccacattttctttatccagtctactgttggtggacatctaggttgattccctatctttgctattgtgaatagtgctgcgatgaacataaatgtatgtgtgtctttatggtagaatgatttctattcctctctgggtatatacccaataatgggattgctgggtcaaatggtagttctgttttaagttgagaaatctccagactggttgaactagtttatatttccattagcagtgtataagtgttcccttttctccacagccttgccagcatttgttattttttgactttttggtagccattgtgactgatgtgagatggtatctcattgtagttttgatttgcatttttctaattatgagtggtgctgagcttttttttatatgattgttggccacatgtatgtcgtcttttgaaaagttcttgtcctttgcccactttttaatgaggttgttttttgcttgttaatttaagctccttataggttctggatattagacctttgtcagatgcatagtttggaaatattttctcctattctgtgggttgtctgtttactctgttgatagtttctttttgctgtgcagaggctcttttgtttaattaggtcccatttgtcaatttttgtttctgttgcagttgcttttggcatcttcatcatgaaatcttggctaggtcctctatccagaatggtatttcctaggttttcttcaagagtttttacagtgtcaggttttacattgaagtctttaattcatcttgagttaatttttgtatatggagttaggaagggggtctagtttcagtcttctgcctatggctagccagttgttccagcactgtttactgaatagggagtcctttccccattgtttgtttttgttgactttgccagagatcagatggttgtaggtgtgaggctttatttctgggctctctattctgttccatttgtctgtgtgtctttgtaccagtaccatgctgtttcggttactgtagccatgttgtacaatttgaagtcaggaaatgtgatacctccagctttattccttttgcttagaattgctttggctattcaggctcttttttggttccatgtggattttagaatagtttttctaattctatgaagaatgtcaatggtagtttgataggaagaacattgaatctgtaaattgctttgggcaatatggccattttaacaatattgattcgtcatatcccttctcttcattttttaaaaaactagttcttagaaaaccaaagcaaaataataatttataatttaaattaggccaggcatagtggctcacacctataattccagcactttgggaggctgaggtaggaggatcacttgagatcagagtttacggcaacagtgagctatgatcacaccactgcatcgtgggcaacagagcaagaccctgtctctttaaaaagatataaaaaaggtaaattaactatcttactcatgtaatattgcatacagtgtggataacacgcctatgaaactttatgctaacacaaagggctaataatcccaaactgtctcaaatttaagattatttactctccaaccctgaaggctaaaaagaagcccatgtttgtacttatacaatattttccacccaatgagccctttattataataaaatttttatttataaaatccatactttaagccttttgtttatatttatttaactcacaagaactaccatgcacacatactgacggagctgagtgactgaatccaggcagggcagatttgcaatgctgagagctctccccacccatcttaccacctcagtgtccagagtccaggcggctttccaggtcggatcaaatttactctaaatttgtctaaatcggctctccagacattatagttacatatatctattatctcacttttcataatgttagtctcatttagacttttgtgttagtttgtccaaaagtgtttcaataccagattatagtaatgccagattatagtaatcagataacatatattattatatatgaatattgtataatatataattcattattaatataatctggcattatatagtaccagattaagtaatcaggggctttttttctgtttttgggggggcgggggatggagttgctgcttatagatcaatgcctgtctgaagactgttgcttatgataaggagtttgctgctttcatcaagaaagtattgctgtgggaaaatgttagttaaactaaacaaaggtgcttagtgacttggttaatttacattctatacagattccttgtctggcaggtaccctgtgacaaacccttcaggcgccagcatattatcttttttgagacaagatgtcattctgttgcccaggctggagtgtggggatgccatcatagctcactacaaccttgaattcttggccttaagtgatcctcctgcctcagcctcctgagtagctgggaccacaagtgtatgccatcctgcccagctaaaggggccaacattttgaatagcattgcctgtaggtgccacgaaactgcccctgccacccagttctaagaagtagatccattggttttccaagtctctagtaagcgtgaaacccggtgaaaggatgctacgcctaattcatatgtcaaattaaacctaacagcccagtgccatttagtgtgggggcaggtaattctgctgaacagtttgagaatgaaactttgaaaatggcaaggtcatgagttaggaattggagagacctggctttgattctggttttactgtgtgacatattttgcttcccttgaggtctgttcccaccccccaattcatgaaatggagacataagatctaccttgtaggatttctaaggattaggaatgatttttatatgaaatatcctgcataacagtagatgcttactattgttaagaattttgaaatgataattaaagctctaaaaaagaaaaaatataggtgattgtattaggtaataaaaagtatgacatgaaactattgttcaaaaggtgatacaagaagaaaaaggaacagaagaacttatattccagaattattttttttttaaatgtaggaaaattagaaaattaaagagaatttttctgaaatggtcaggaacgtaaagaggtcggtgtattttaagtgtgtaagtgacagaaggaattgccttcttcaaaataatggaaaaacatttgactacctaaaaatagagagttcaaaagcataatccaaaaaaaggccataaagaggaaaatatttgaaaccaaattattatatatcaaacttgtaatagagcaaataaagactgtatatcaatggcattttataccagagacataattgtaatcaaataagaaaaaagcacacaaaatcaattttgaaaaaagttgaacaaatagagtaatgaaccccatatcacttggtgactagaggatgctagcagtctcctgcctagtgtcctttgaactggagcctgaattgtattaatggtccagaaaaagttcatgaaggtcctcgtcctcctttggttgtatgggtgtataggggaagagagaatcaatgatgaagttaaatccagagtatcagtaataaaaaggtaacgggaaaatgtgctttataggcatgtggatctttgttcaatgaataattatttcttacatgtctttttgtggtcttttcagtaatctaccgatttagaatcaaagctagttgaagttagaaagtatggatcacacatcctgccactgtgtgcatctactttatatacaactaacaactgtgggaccccagttacaaaggctgtcggaggtgagcccactgagagctggcagggggtttcttatgcaggttgtatgtgggttttggagaaggtgagagaagtgcattctaggaggaaggcagagcatgtacaaagactgcaaggaaggaaaaaactttggcatttttttttttttccaggaacagaagggaggctgttgaagctggagttaggttagcttaggggttgatgaggctgcagagtgagcagaggtcagatcatgcagggtctttcaggctctaggaaggaattggattttatcctgaatacaacagaatgatactgaaggttttaagcaggggagtaaggagatccaattcatattttaagttaagttttgctgctgtgtgggagttgggttggaggaaagagtgggagcagagtaatgtgttcacagtggagatagagaagtgagcagatccgtgggatgtttgcatgtagagtgaatgtgtagggggttaagggaaaggcaggaatcaagcatgatttgtcatagaatgatttcttgccaaaaatgacaacctaaaaacatttggcattttggagcattctcaactctgggccccctctggttctgcactcttctaggacctcattttagctgccttttctccctctgccccctcccttctgttctgctctccatttgtgtctccttcttagtttaattctctattttcaactctagatttcctctactttttccttttaaaaactattcttgccagctgccctggtggcacctgttgtcccagcttcccaggaggccaaggcaggaggatctcttgagcccaggagttcctggctgtagtgtagtgtgcgatgttaatcaggtgtctgcactaagtttggcatcagtatggtgacctcttgggagcctgaggaggagccaactggcccaggtcagaaatggagcaggtcaaaactcctgtgctgatcagtatagcatcatgcctgtgaatagccacagcactccagcctgggcaacatagcaagacctcgtctctataaaaaacaaaacaccattccttatttaattttaatcacctttcttcaaataatcgacagtcaaaatttctggccctgacctctatctgcagccgtttgtggaatttgtgtagttaatctgctgcattctgaaatagctaacatgcattttttttcttgatcttaaattagcttcctctcttgacttccctttttctttttaatggttccaccaatctttgtcatccagacaggataacttagtaatatttgattcattattttccttcactgcaattcaacatgtaaactccaatattggttctaggttgttgatgaagaaactaaagctcagaagcattgtcacctgcccagagtcacacagctggtcactggtgacacgggtttgtgagccccactctgacttcagacccacattctcaatcattgcactatactgtacaccagcggtccccaaccttttcggcaccagggactggttccatggaagacagtttttccatggattgggttgggggatggttttgggatgactcaagtgcatgacatttatcattagattctcataaggagtgtgcaacgtagatccctcacgtatgcatagttcacaatagggtcacgctcctctgagaatctaatgcccctgctgatctgggacccagggcttggggacccctgctatacgccaaggagatttaggataacgcttttccaaaagatacctaactttactttgtttttaatatatgctaaattttaaggttgagactactgctattaacaactgtcattctattatttagtattttctctataagtatgtcacatatagtatctctttatagagattttcaatttcttatagcagcttatttacattcaccctttttgagcgggaagaagaaaggagtgatattgagtggtgggcacaagattctcccttttttcttccctaccattacaggcgagagatcatttacccttgctcctgcaaatactgtttcattgttcgaaacatagttggccatctggcaaaaactgttatttaaaacttgcattcttttattactagtgaagttggaaacattttttggtgtttactagtgatttctatttattttgtgaattgcattcattgttcacagttaacattatccccattattatcattggcccttagctctgaaacttggtagagatgaattaaaaggtgcaaccagtcttctaacttctgcatcagaaattgggttgaagatgtcttacatgaacctgtggcttctgagtatttaacaaacttttatattaaccatctgaacgtttacatctcatctttaatacaaattctggaagtggtggtgcagagttgccagtctgagagattcaggctcagctggagaatgtgttgggcctgaagtaacacaactgtaaacctatttgtggagaacctaaatgcacatacagtgatttgcctccacatcaaagacctctctgtagtgccttagggtatggtgagggcagtagtccagatagagggccctcagtgactgtcccatcttttagaacagagcccacagggttgggttcttgcaagatctatctggggaatcttcctaaagccatcacgacagggtctgtcacttcattaactcaacaaatactaattgagcatctactctgtgcctcattttgttctagatcctgtggttatggcagtgaacaaaatgaatagaaatatccctgacctcagagtttcccttcggggacaagtttagctcccctggaggctctccatacttgactttctcaagtctaactctttctttgcttcctagctcctcgccttaatcctctttttcctgtggcccttagatcaagcctggcttcctcttcattttcagtgttctgctactaagttcaacagcttctgttaataagggacttcttttattcctggcttcaccatgtcctagctgcaaccctcagtcccacccaagtcagactggtaagtgcgggccccaggcccccagtgtcctcttgtgagaattctctttgtcttctagtagctcctcgttggaatactggccattcttttaacacattggcttctgaaataagtgtagaacatgtgtgaacccactgtgtatattggggttcactgctccctagggagtttggtctacctgaggcatgtgatttgtgtagatcctcaagtaacagcccagggatgacaatcttgacttgtaagcatggccacattatcctgcagccctgactgtcctgataattgggtaccatccattctttttgttttacttaaaagcagtttatgctcagtgaagaatatttgaaaaatactgacaaatatgcaatggcttttttaaaaaaaaaaaacaaaaaacaaaacactggttaaggttttcttttgaggggggagcttaccttctaaacagctgttttatgtgcaactgcatacttttctcctgctttcattgatgttttacaagttgacatttgtgtcttatctgtaacctgcttgcagattggtcgctagccacttgcagagtgcaattaacaagagtgagctccgatataaagatggtgatttatttccaaagctagcttagaggaagaagcacaggtgtcccacctccaaatgtaccccttagcttttggagcagaaagtgggcacttttaaaagtcaagggagggtgtaagcaaggtgggggatacctgtgttagcttggtgccttatcaacgaggcggctgagctggtgactgctggggtcttcatgggtgtgactaggccctaaacccctcaggtgggagagagtagtgggaatgtttttcgactgttctctcgaggcaacctcctgatgggtgagagttgcatagcaggcatgccttggtctgtaaattgactaactctcgaggacttggatgaacttagtagggaatggctggtgaaggagggagtaaaaagctattttttagcatttctaaaaggctgcgtaggaagtggggaatgaaaaaaagaaaacatctctttgaaaaatggggtacttggttacatatttatgtaacaccttctccctctttgaacacagctagttttcaggaggtccaggcccgtgtcagtatgctctagggtgctgtggatgatgttgattctggggtctagcttgaccttgcttgtgaggaatacttcacagacctcactacccagccagcacattcattttctaacagccacatttccagatttcctttccttccttctttcctcctgttggctttgtgttcctcagtgtagctctccgtttccttccagtcttcctgggaactgttccttccccaggagctgcccataaagccttttccccacctctgcttctttcttctctgctaatatttcaacatagtcaagatattttgattattcacatacattttacaaggacattgtaaagaaagggctttgtggcccaactgtggtctgagcagtgtttgttccccacaccgaggcagcatattttgatggtttagactgagaactgaacccaggacccaaagcctggctttaccatttaatgtgatctgacttctgtgccccttcttatgcttgtctctaaaatacagtgtgaaaatgtccatgtaatttgttatagtgagcattaaatgcactagtacatgcagagtactcacttggagcagcgactggcacaaagggagtgttaaataaatattagatggttattgcacatacttaacctgcttggaagcactggtgtgaaacaattttccagttaataatgagtgttcaaatttctttatgttgaacacagttccttatgtttcagtggcccatctcatggactcaggtactgcctgttgcaattttttacatggattggtttctgcctttaggagccttttttttttttaaataaaagaattgtatgtgttaatgtagtaaagtcttcaaacataattttggcctttaagggatgtttttatactcactggcctatacccgagttgtcactcacggcctctgctagctacttcacagctcctgtgaaggacactgctctgcccacagcccctgctggggagaaagctctctgaggactgtgtcctccctcttctccttttcctggggtggctgatttgattgggatgggacaccagatagctacctctgtcatggccttccgtgggaaaaacatgagccaagccaatttgattctcttgagaattttaatttgggaaatcagaaggaaaaagccgtgggagccgaaattgaaagaatgccatgaactaatggcatgaggacaggcctgccaggcagtgacatggcagcaaacccagagtctgacagcaagaattaatagaagtagaagagaagatgtgacaattgcacgcgacagagaaaactaaacacacagagagaagccaagttaggttaatggcagaggcccagggagaagatctcagacatagctgtactgtgagttttttctcaaagcaagttgctcacatgttttcctggtctcttcgtaattgtattctcattatttaaggctttgcattcaaaaggtcctaacttaacagcagctatatagcatatgtagtcctttcctttcccatcgaaaggattactctcattttgttcttattgccttaatacctcttctgcaatttaaagtgatataaatttaactcactttttagtactatcttcaagtctccatattccatgctgtgttttcctgatagcagtaatttattttcttcttttttttggaatatgtcttctattgcactcctgtgaaatttgcaaatctggacccctccgttcctatgcaacacgggctggtgatttctctcagatctagggcatggactccttagggcagcagcctcaccctctttgtattcgtacagcaccatgggctgtgctgagcaagtgatagatgcccaacaagtcgttggtcgtttcttgtggttcatttagttcttatcatcgtggcttgtcttggatcacaaaagaggatgttttagccctttgctaggatgcatctttttttttttttccaagctttaaatttatttgaaggaaaataaatattaaagaatttgagagaaatgagggagttatacagtaactgttggctttgattgggaactaagtttctcatttgtgccgtgaatgttgatactccaatggcagaggagtgaacaaactcatttgttaagcgagatgaacacctgacagctaaatccctactaatatttgctttgggccctaagtgtattctgtggttaacaaggtaacttgtcttgacattactcccacatgtgggagtgtttttcttttggtattccctttcttagcatatttgggaaaccactttatttgccaagttactatatttgctaccaaaatgtttgaataatgctgtgttttgtcattgagcgtaacttccatgatctttaaaaacaatgctttgaaatagtgttctcatctgtatattgtttctcttgtgtcctaatttcttctttttataagaacacaagtcatattggagcagggcccattcttaatgacctcattttaactgattacttctgtaaagaccctagttccaaataaggacacattctcaggttctgggggtttggatttcagtatataaatttggggagaacacagttcaacccataatacagaggaaccaccaccctactaattaccatagcacccattaaaccaggctttcttggcgtcgaagccaagaagcttaaaagatttgtttgcccctagagtccacagtcattaggttgagacttctgagtctcactaggtgttggcatagttaccagaaaatccttaaaggaccctcctcatctctcacctggatcaggacaggagcctcctaacttgtcaccctgctgccgcccttgtccaccttcagtctgctctcaacacatctctgggttccactacttcctggttgtatgaccttgggcaagttgggtaacctgtgtctgtgtcctcttctgttgtagtgatagttaaccgaatctacaaacgtaaagtgattagtagagtacctgatgttataaggtgtggtagccagaatggtggccctccagtgatgtcctgtcctaatcatccctggaacctgtgaatatgttattttacatggcaaaagggactttcagatgtgattaaagaccctgagattattggccggaggcggggggcggggggaggaggttatcttggattatcgtagggcccattgtaatcacagtggtccttaaaagagagaagagatgtgatgacagaaacaaaggtcaggctgggcactgtgtctcacacctgtaatcccagcactttggagggccaaggcagggggatcacttgaccctaggagttcaataccagcctgggcaatgtagtgagaccccatctctacaaaaaataaaaaaataggcgataggcgtggtggtggtggttcatgcctgtagtcccagctactcaagaggttgaggtgggagtttctcatgagcccaggagttcaaggctgcagggagctatgatagtgccactgcacgctagtctaggtgacagagtgagacagtcctgctgacaccttgattttagccccatgagacttcccccattttagacttctgacctccaaaaactgttagataataagttagcgttgttgtaagccactgcatttgtggcaatttgttactacagcaataggaaatgaatacgtaagtgtcagctgttttatctggttttcctgttcctactgtaaatgagattttctttaaacagaggaatctgtggccaaagacagttggaaaatgagtgggctaggtggtcgccagcattctcgtcctatctcccatcctgatgtggcaggtactctctccagacagtgcctagccccagtagtttctcagcatttgtggaatgtttagggaaggctggatggtggtctccagtgtggagctgcctgtgggattctctccagtccccacatcactcctgaaggattcttcataattatttggctattttggtgtttggttgtctgtcatgtgcaatattggccttgagctctgtgctccaggtttatgggtttcttttggggcctatgcacctttgtgggctctccttgttttccttttactccataaatttgtcacttcaagtcattcaagtgacttcagatgtgtattctgtgataagaattcattacacagacaccccaggcaagctggactcagagttagggccaggaacgctttaccagaatagagccagagacaatgttggcccatgagctgcttctggaacagcctgtgatttggcctttaggcctaacctagccccgtgatgcattctgggcttatgagttgtttgcagcattttttaaatctaaaaaatgagttagttatttgctttattttttaacctgtacagagaagccataatgccatttttgcatatagtaccactgctggttttgtaaaacaggaaaacgtgaaggaaaatatgaagctagtctacaatcctagaggaatttcatttcacttccaagttacttggattaatgtcaacattatttcactggcatgaagggtactaaattcttagagtctgtaccctgttcctctttagataaaacatgaaagaattttggtgcgtgttttgatgtgcagagtcaggggcagctccctcagcagacctttgcgtagttgataatctaattatgtggctctctacataaagaatatgagcttccaggtgcaatttgtctattttaaaaagggctatggaatctattatgatttataaagaatcttgtattcagatttaatgagtgacaagagtatatttattaaccataccctttttcttttcaagcccaggattatagaacatgctgcatttctaaaagcatccccattagtgctttcgttgctggggtgggaagttgtaggagttaatagtgacaacttcatgacgagggctcaggcttgtaacttaaggggttatcctgcactgacagtgctgcctagatgggcagtcaaggtagggtgacccaaacagagatgctccccatccccccagcagagtgtctgtttgtctaatatctcatggtcttaactaaaaattgttgataaataggtggctctgctataagaaataattttctcagttgtagaatcaaggacaagcagtggcagttcaggccagaatctggaggctgtccacacctgaattcaaaacgaggttggctctctccatgtggtatcctacctctcaaactcagcacatctcaaatataacccctcatctctcaaactgctcctaaccctgggaagaattagatcacctacattgtctctcctatttgcctgtggatcaagacacaaaaattcaagtctggaagactctgaagtggcaagttcatttgaagggtgcaggtcacattcattcttttatgttagctgtgctttttgtgcacagtcagacttggcattatccaccaatatataacagccttgagggtatctcaagagcagtattaattcacaatactcaggaattagcaggcagaagagaatagggggcatggagttacaaataaatgatttttccatttaattgcaattctgcactagagtcatttagagagcctgatggtttcacaccagttgagatctgggcaaaaggacctgggaataacgtgaaatctcttgaaagattgaatggtgtaatggaaaggacattggtgggagtctgagaaaccagggagttgatcctttgcctccaggacttattaccagcagtgtaaagaggtctgtgacttgactgagtcactaaactatctctgaacctatttttttttcttcttctttttcttttttttttttttaaaggtaacagcaacacctaccctgctggtgtattaagaataattgaaataatatttgtaagtcaattagcgtagagcaggcgctcaataaaggttagttggttaggctgggcgcggtggctcacgcttgtaatcccatcactttgggaggccgaggcaggtggatcacctgaggtcgggagttcaagagcagcctgaccaacatggagaaaccccatctctactaaaaataaaaaaattagctgggggtgatggcatatgcctgtaattccagctacttgggaggctgaggcaggagaattgcttgaatccgggaggcggagtttgcggtgagctgagatcttgccattgcattccagcctgggtgacaagagtgaaactgtcaccaaaaaaaaaaaaaaaaaaaagttagtttgttagtttcctctattctccctgccctgcatctaacccaggcagagatgttgctggtctttgtaactaacttagtcagaaactgcttgagttttatgtgcaatgatattggaaagaaaatacatttaatggactgcattaagtttagcaaactgccttatgcttttgttttgaaaagaagaagacatctataaaatatgaactgcatgggaaaataaatttaaaatgtataaagtaatggaaaggaaattacatttataattattaaaagaaatagaatatggtgtggtcagatttttaacagtggaaattttgcataatgaactctggtaaaaccctaagaggagatcaccagaaaggggaaaatgagtgatagaaatgcttatattttaaaatgaagaaatgatataactataattcttagcacaggtacaaagcatgctctttacatagggagaaatacatcagattagttgtgcaaatgagccccaatttaatctgttacaaacattttcaactaatgaaattaggcatgaaatgctgaaaaattggtgcatttcagttttaactttccagagaacctactattctgaccatatgaaacaccatctttaaaataacctgcagcctttgatctagtgattttggataaaataatgaaacagctccaatggaagactatatagcttatgccagtctattcatagcaatatataaaaaatacataggtaagtaaatataaacaaacatgttcgtatatattatgtgtaaatgtgcacatataaacaagatcctgttgcgatctggcaaagcaaacagcaaaatagaataatgtgtatgtgactactaaaaattataagcccacaaactatcagtatttggaaataggtacatgaaataaaatcatcctattatatctttttttatttttatttttattttattatttatttattttattttattttttcttgagatggagtctcgctctgtcacccaggctggagttcagtggcgctgtctcagctcactgcatgcttcgcctcccgggttcctcccgggttcacaccattctcctgcctcagcctcctgagtagctgggactacaggtgcctgccaccacgcctggctactttttgtatttctagtagagatggggtttcaccgtgttggccaggttggtcttgaactcctgaccttaggtgatccgcccgtctcggcctcccagagtgctgggattataggcctgagccaccgtgcacagcctattgtatcttatttacaggtttggctgctgtttcagggatgtagagaagcataagactgacagccgtcgcttcagggaaatgaggttccggagtgggaagataggtgacaatgcgcaaatattgactaaataagtttgggtgaatgagtaagtgctatgaaggaaataagacggcagtagaatggagagggccacggtgcctaggactagccctatcctaggaaggctgaggtggggaggattcctgagctgagccatggtgttggaggagtgggctagtaaagatgtagcctcagggaatagcaagtaaagggttttcaaactggagtgagtttggcatgtgtgaaccaagagcaaccagtgtgtctagatcttagagaacaattgcatgtttgcctggtttacattaggaactaagttattttatttatttactttattattttgagacagtctcattctctaacccaggctggagtgcagtggtgtgatcctggctcactgcaaccttcgcctcctgagttcaagcgattctcctgcctcagcctcccaagtagctgggactacaggcaaccgccaccacgcccggctaatttttgtgtttttagtagagatgggttttcactatgttggccagtctggtctccacctcctgacctcaggtgatccacctgccttggcctcccagagtgctgttacaggcgtgggctacctcggccagttttttttttttttttttttttttttgagacagggtctccctattgcctaggctggagttcagtggcatgatcttggctcactgcaactttctcctcctgggttcaagtgattctcgtgcctcagcctcccaagtagctggtattaaaggcatgcaccaccatgtccagctaatttttgtaattttagtagagatagggtttcaccatgttggctgggctagtctcaaactcctggtctcaagtgatctgcccaccttggccttccaaagtgctgggatgacaggcgtgaaccaccacactggccatattttacattttaacacaaccaaattttattaatttttctttatcagttatcttttcaattaccctcaaacctaatggctaaaatagcagccatttattccattgtgcgctttactcactgggcagttacatgtccctccaaacagcctcatgcatgtacagggctggctggctggctggctggtgggctgctgctgcggcaactatacggggccactgagccaggagtcattcatcagtgagccggcgagcctgggcttgttctcgtgaaggactgagggttccatgagagtggagcagaggtgtgtaacattccttgaggtggaggctctgaattggcacagtgtcactttctctgtattctattggctacaagactagcccaggttcaaggggtgggaaatagatgagtttccatgggaggagctgcaatgtcagtgcactgagatgtgcctgcaaggagggctggaggattggtccatgcttgcaatccatcccatttcaccttatgcttggtgcttttcttctatactttaggtgtaagaaattaaaatcctgtatgatccaaaagttttacagttttgccttttcatatttaggtctttcagtgttcacatattatttttaaaaattgcaaacagcacgataaacatgaattagaggaaaaatgaagtttcagaaacttacagtggggaatgttgaacaaaaggttagaggctgtgcacgtggtggagcaggggctatatggggagcctttgtatcttcagctcagttttactgtgaacctaaaactgctctaaaaatagtctattaaacaattttattaccataatatgactcagtcttcattatgacagtaatgtgtgaaggagacacacaggaagacagcagctgtgtgaagtgcagaagtcagtgaacaccttcttagaaagtgctttaaaccagaggcaggattgtatactgctcaggccatggcctttggaccagtggttctgaagaagaagcaagccttcgctgctattgtttgtagctgtgccaaccttatgcaaattactcaacatctttgaggtttggcttctttgtttgtaaaatggtataataatctttatatatctcttgagaatttttgaatgaaatgaaatgtgtatcacctagcacggtgcaaggcctgtaaaataaatgttagcctattttagaagtagagttttccactattaatctccaattaagatgaggacctctgtaggtcttttgcagaattaattcttcctaccatttcttcttggccttcagttacttctctgatgctgttttctatgaacattctttttgaatcttctgggtttctctggctggagtggttatttggcaattggttaagagcagctggttggctgaccttgggcttttgagttccttatgtctgaaaccatggcaggcagccagattgcatcaagccactatcaggtgtgtgtgttcctaatcacagcctgaacttcagaattgggcaagtcctgactggagtgagcagagaaagggagaatactttagggaacaatgtgaaataatcagatctgaggaagaaggaggtaggggagggaataaacattttttcagcatctgttctgtggcagggtatgaactagaagtcagaggctacccagagcgtgccaggttgaagatggcgggccatttggcaagggagttgggtcatgccttctcatagattgagcggaggagagctctacagctttaccaattttaggaagaataaatttcttttatgctttgacataaaacaagaacccaagtcatcattatacttttctttctaggtctgtcagtggcccagcggaagtttgctcattcactcagagactttaagtttgagtttatcggtgatgctgtgacagatgatgaacgatgcataggtaattaaacatgatattttggtttgttttcctttgccatggccaccaaataatcactcctttcttcttacagatgcttccttacgtgaattttcaaattttttgaagaatctggaggaacagagagaaattatggtgagttgagaggggtgtaaattaataagtcagctttcaagggggaaaaaaatctggatttggaagcttgttctggtagaagttgtgaagcatttatccctgggtacagtagtgcattgtaatggaaagatgaggtttccggagccctgatttctagttccttgagggtgctgaccacggtcagaacttggagaagctgctgggcctctcgaccaaggccttacttcttcatctgtaaagtggacagtaggactacatcactgctttctagctttttgttgcagcagagcactttaatttatgtaggctctcatgcagaagcttaatatatcagcgggataaaagcagaaaagcttatgtagaaacagaggacagctgggcaatgttagtgcctgactcatactcctgtagatttctaggctgtgtggaaagggagagaacttgggccttggaggtctttgagatcccactttgcatcaagattcatgatcataacaagaataagaagaactacccttggccaggcatggtgggtcatgcctgaaattctagccctttaggaggctaagctgggtggattgcacaagctcaggagttcgagaccagcctggcccacatggtgaaaccgcatctctacaaaaatacaaaaactagccaggcatggtggcatgtgcccatggtcccagctactcaggaggctgaggtggaaggatcacttgtgcccaggaggctgaggttgcagtgagccgagattgtgccactgccctccagcctgggtgacagagcaagaccctgtctcaaaaaaaaagaaaaaacaaaacaaaaaacaaaaaacagctgtcccccatggggtgctcttcatatgcagtgctgtgctgagtgccttgagtgtatgatctcatttgcactcaactgtaaattttggggttattgaatattgtctgcttttcttaaaagcttacattaccttcctaatgatattctttaattaaaccagatttacagcagaattgctaccaggttgtgacacaccatctattctcaccatttatttcaggcttaaaaaaaaacacagattcaggctgggcgaggtggctcatgcctgtaatcccagcactttgggaggctgaggcaggcgagtcacctgaggtcaggagttcgagaccagcctggccaacttggtgaaaccccatctctactaaaaatacaaaaaaattagctgggtgtggtggcatgcacctgtaatcccagctactcgggaggctgaggcaagagaattgcttgaatctgggagatggaggttgcagtaagctgagagtgaaccactgcactccaaacttggcaacagagtgggactctgtctcaaaaaaaaaaaaatacggattcttttttctatattcttgaaaatgagtactatctagaattacgttatagtgtaagtgtatgagtgggtctagatgtggtagaaataatactggacatattagctaagttggtttaccttgactgtgtgccagtgcattagtccgttcttacagtgctatgaagaaatacctgagactgggtaatttataaaggaaagaggtttaattgactcacagttccgcattgctggggaggcctcgggaaacttacagtcatggtggtggaaggcaaaggagaagctggcaccttcttcacaaggtggcaggatggagttgagtgcaggcaggggaaatgccagatgcttatagaaccttcagatctcacaggaactcactgtcatgagaacagcatgggggaagccacccccatgatccaattacctccacctggtcctgcccttgacatgtggggattatggagtttacgctttcgtgtaagatttgggtggggacacagagccaaaccatatcagccaggagctgttctaagctgtttacctaatgctaagtcactgaattctcacatcaaccctatgagatagattctgctgttgttccccatttaaaggatgaggaaactgaggcacattaccttgccctagatcacatggcatctaggaggtagagctggtatgtgttaagaagcaggcactctgaactgccctccctgtcactgcagctggcttcgtaggtgtcactctaatttcctgggtggtggctggtgggggtttatgttggctagggctgcgggaggacactgatttggatttaaaaagtgacagagggctgggcgcagtggctgatgcctgtaatcccagcactttggaaggctgaggtgggtggatcacctgaggtcagaagtttgagaccagccaggccaacctggtgaaaccccgtctctactaaaaatacaaaaattagctgggtgttgtgggcacctgtagtcccagctacttgggaggctgaggcaggagaatcagttgagcccgggaggcggaggttgcagtgagctgagatggcgccattgcactccagcctgggcgacagagcgagactccatctcaaaaaaaaaaaagtgacagagacatatgtcctcaaaagccctaatataatttgcactcattcctaaattttgaggtaatttgtgtgtatatattgtagatactgtagagggtgtgtgaagacagtgtggtcccatgaggtttttctggcacacactgacagatacagtcattattcatgtgatcctgtagtcatcaatttttcagctatttaggaaagactaaataagatggtgaataaaaatagtgccatgacatcacctttctagtacatggagccgatgtgtgggctggtgaggtacgtgttcttagtttatgttaatagtgtcaattttttttcttaaccctctttgatagttgtactttcctggcatcctgaacattgagcgcatacctattgatctctttttatgttccagttgctgttgagaatctcaggacaaaggtaaaggcaaagaaagcaaaagtctctgccttcatggaggttagattctaggcgggggtagtgaagtagaaataaacctgtaatccattggcaggcagtgaaaaatgctacaaaacaatacagggcaaggagccaggtggggcggggctacagcatatctggagtggtgaggtgcggactgccttttcagtaggatactgcacaaagggcatcatcctggtgtctggaggaaaagttctgagcagagtggtgctggattttagctctacagaaatagcgtgtgaccattgttaggctcagtattctgtttctgttttaggttcctagaaatagagcgatgaggtccaaaaacaggaacatggtattggctccaggctgtgtggagtagacagcatggtttgcagagctgttgttagccaactgactggtttaagctccagctgtgatggaggttgatagggtctctgtgttagacaaggttgggttcccatgcagggtaggaacgagaatagggtggtgtctgtataaggccatgaaccttaggagtggtgtggtgtgtcatacacaactcattgtgggaacagaaacacctgctggaaagcaggacgctgtccaaagctggggtgggtggcagccacagccaaccacggaattaacaggacacctcctaatgctttcttcctttttagcttggaaaatttcaaacatgtaccaaagtcgagagaaatatacaatgaaactacatggactcgacatccagcctcagaccagtctcgtttctcctgtgatccctactccccttgaccccctgctctcctcattattttgacagaaagcccagtttcattcacaaatacttcagtatatatctcaaaaagcagacacttaaaaaaacacagtatccttatcacaatcagtaatttcttaattttgtgaaaagttaggtcatattcaagttttcctgatactcattccaattctgcctctttccctccccaagccccgccctcaataacagttggtctgtttgaatctgagtccaaacatattacatttgactgatacatttccaagtcactttcaatctataggttcttctccccatccgctttttttctcctttacaagaattcctgatccttttatatttgcctcggaaacctttaaaatagtactttcctaagttatcagtgagttgcaataatgaaattagtaaaagttgaaaagttggattcttaacccatattgacattgtttgggtacttctcatcttgatagtcactgatcacttttttttttttttaaagtggaatcactgtggctacctttgtttctttaaatacctttgaatgcttactaaaacataactgatgcattgcagaacactcgcctgaaacttttgaggaagaatagatacttgcctcaagaaatttccagtgtgatactggagagtaagtggtaaagagctaattaaatagcctatactaagtgcttcagacaaggaatgggaaaagaaaacaatatacaaagtgcgccagcaaagataatgtggctcacatggagtgggcagcccctaagcttgtggctgttaggaaagggtttatggaagaagtattggagctagagtttgtggggtggagacacagcagagggcctttgtatagtttagtaagcccatacccccgacaccgggacaaggagaaaaggaatgtctttaagcagctaaaatggttgccagtacattctgagaactttgaaagactcttgttttacttaaattttttttaacttaaaagttttagaaaccatcagcatgttaaaagccacagattaagaaaggaatgcaaaatgactgtaaaatggaggtagaaatagtctaaaattggttccaaggatttcatagtggtcacttaatctttttttttgtttgtttttgagatggggtctcgctctgtcaccaggcctgagtgcagtggtgcaatctcagctcactgcagcctccgcctcccaggttcaagcgattttcctgcctcagcctcctgagtagcggggactacaggtgtgcgccaccacgcccagctcatttttgtatttttagtagagatggggtttcaccatgttggccagatgatctcaatttcttgaccttgtgatctgcccgcctcattcacccaaagtgctgggattacaggcataaaccactgtgcccattccactttatctttaaaagcaattagtttagtattttctgaaatcctaaattgaataatggtgcagcataatattaataattggatattcataattaagactgagtcattaaaatgttaaaactacatatgtctattttagaaggcaaacagtaatgtcaactattttaaaatgttttctgaatcttaagggtaagatgagactttaggttttaagggataaagtcatctgtgtgtatgctcagcaatccctgttggttttgagccaccagttatataagttcatacgcctcatctctatgcttaaataggctgtattaagtatacagttcaacaaatagtgtgtgcctgccacatgccaagcactgtgccacatgctataaagataaagacataagtagtgattcatccattggaggagatggctgaaagaaggcatgtaatttccaacatgcttcgtggtaatcaagtgattgagaaattcagggaaggcatcttggagaggtgatatctgggctgagttgaaggatgagccttagctatgtctggtttcctccttgaggggaaactgttgaaatttcgaaaagagggaaggatatgtttgcatagccccttcctttcccccctacaatgtccagctttgttcctactaaagtgaattgttggagagagaagtagagcaattgccagtctaagaaaaaaagtcagtgtttccctccacactcaaagaagtgtaatttctatgaatacacatgcctcaccctttaaaaagtcaagatagtttttttttttttttgagatggagtttcgttcttgttgcccaggctggagtacagtggcatgatctcagctcagctgcaacttctggctcccaggttcaagcgattttcctgcctcagcctccccagtagctgggattacaggcacctgccaccatgcctggctaatttttttgtatttttttttttttgagatggagtcttgctctgttgcccaggctggagtgcagtggtgtgatctcagctcactgcacccctgcctcctgggttcaagcgattctcctgcctcagcctcccgagtagctggaactacacgcgggtgccactatgtccggctaattttttttgtatttttagtagagacagggtttcaccgtggtagccaggttggtctcgatctcctgaccttgtgatcttcctgcctcgacccccccatcgtgctgggattacaggtgtgagccaccgcgcccagccaatttgttgtatttttagtagacatgaggtttcaccatgttgggcaggctggtctcaaactcctgacctcgggtgatccacccgcctcgatctctgaaagtgctgggattacagatgtgagccaccgcgcccggccaggacagtgtttttgagtgagtagtttttgctgatcatgttgccacccttgactctggaggtgaagaactcaacctggggagtcagatctgatacagttagtggctgcaactgctctactcacttctgcgcgtgttctcagaggaaagggctgtgtggtgtgttgctgccagaattccagagatgttctctctggcatggcaggacatgttgtacttatctgaggtgggcagctgtccaggaatctaaggacttttaaaatagtgctgtagtgtttatgttgttcttttaaaagcccttcatattgcgtttacttctctacatgtattcttttatcagatcattgagtttcatccctagcctaaaatggttgcccagtttctcaggattctggcaaataagggcaattggttgagacccagaggttcaggaaaactgcggggaagcgggagtgccaggagagagaaggtggagcttgcctgatggtgcacaaaaggtgcctgagatggagctgttccgcctccctctcatcctgggggtgctgggggcagactgggctgctaaggagatgtgaggaagtgtcttgtccacagctgcacccctttccccatttgggcaggaaagccctttgcctatgcagactcttcaggcttttgagacccttttctttttctgttgtttttctctaccacagactttacccttgtgaaaataccaggccagggatcacttcctgggtgacctgccctgagcttttgcccctatagggaaggtactaagctgctgcgtaccaaaggcttttgttagcatttagatggtcggtcacaggcaagacgtgatgcctgctctctcagccctggcctgtgctttactgcacccccttctcatcatcctttcatgctctcaaatctcctccataagtttttggacttttgacacggatttttgttccaaactattaggttggtacaaaagtaattgcggtttttgccactttttttttaaatggtcaaaaccacaattcctttttttttttttttttttttttgatggggggagccttgctttgtctcccaggctgaagtgcagtggtgggatcttggctcactgcaacctctgcctctcatgttcaagtgattatcctgcttcagcctcttgagcagctgggactataggcacttgctaccacacccagctaatttttgtatttttagtagagacggggtttcaccttgttggccaggctgggctcgaactcgtgatctcacgtgatctgtgcgaattggtctgccaaagtgttgggattacagatgtgagccaccgcacccagttgaaaccacagttaacttttgcacttacctaaatattttttaaaaagtgtttcagagtattactaaaagaatgtatgatggttaaaatgagttaaatgcattccaccttttaggagcaaatatgctattctttctttagtatgccctagggcacttgtcatcaaagtatggtccctggtccagcatcactttaggaacgtgcaagaaatgcacattctcaggcccaccccagaactctactgagtcagaaactctgtcagctggtctttcatgaaactctccaggtgattctgaagcaggctgaaatcagagctactggcttagggtgctagtgaaatcttggctggcaatcctttccttagggttagatctgtctggacgttggatacgctctaaattgtttcgtgatgactgtgtccctgtcaggaggttaaaatagtgatggaaagcctaagctttgacttctcatttccaaaggatttgagactatagctggtttgtgttaatggaataggtttagtaggatttttagtgttacttactttgtatttaatattgcttgtgagttcttataggataagtacctaaggcattagatgccattaaaaagattatgcctttagtttcatcttattatatttacagtattttatatggcatgtgaagcttgttttaatcagttcttttacagtttatgtggatttctgttggcaggcacattcagaatggaggaaattcatcttgaacttatttgtgagaacatttctcagtttggtttaaaagttgtcagtgacctaattttatgaagactttttcctccttggaactgacctttacaattggacagcattgctttttcttacaattctctttttcccgtaagcctgttattcagtcagatagggatgtctttgtaaaacctgtttttcaggaatgtaccgtttgagagtttaatttactgactcagaatcctatagagatcacagtcaggaataactcaaatcaaaattctaaaatgagtgaagattatcttaggcaggaggcctgtctccttcttggacccctttccctgcaaggccttgccccatgactcagtgtcctctctgttggtgactcattatcatctgtggccttccagccttgtcatcatcagattctacttccctgttgaaacttacatttcctgaatttcatatccttagggtgtattctctgcttctgaggaatcggccaactctgctctcttcttccccctgactgccccgcccgacatacacacacccacccacacacacacaagggaccctagaatgtaaccagcccatttaattgtctaatccagaggagtgattcgattattgggaatgtgtgcagctgagtctgctgtttcactagggaaatatttcgggatgagccaaggtacctaggatcagcctttagaccatgtcatgaaaatattagatggtatagccttgaaaacaaagaactgaagagaacttagggagacatatttgaccacttaattttttttttttttttaaaagaggagtccaggcacggtagctcacgcctgtaatcccagcactttgggaggccgaggtgggtggatcttgaggtcaggagttcaagaccatcctgaccaatgtggtgaaaccctgtctctgctaaaattacaaaaattagccagtcgtggtggcgggcacctgtaatcctagctacttaggaggctgaggcaggagaatcgcttgaacctggaaggcggaggttacaatgagctgaaatcgtgccactgcactccagcctgggtaacagagcaagactctgtctcaaaaaaaaaaaaaaaaaaaaggaaattggagctcattgagggtggagtttctacatcactaaataaggttgtgacagagatgaaaatagaatctttcacatcttctagtatcctaacgacattatgccttacctttttctctttgtaagacataatatttttccttccacctttgaacattagtgaaatggatatgtatcttatagttgctatccaccaggcagcagtcatgaaacggacatgaggttacttctcttttactctttggacaactgtagctcctcagtatttcagtccacagaccacttaaggaagaaatatgaatgctggtggtggtttgaaaaccttccgttgagacctggttaggtcaaggaagtgctggtatcagtatccaaagagtgggtgcctgccatcatcttggaagaaaatcctggatacaagaatggagctccttaagagcaccctttgaagaaatgatgcatctccagtattttcagtggcacagaggaaaaatatgtgtggtgatacggtttggctctgtgtccccacccaaatctcaccttgaattgtaatccctatgtgttgagggagggacctggtgggaggtgattgggtcatagggccagttttccccatgctgttcttgttatagtgagggagttctcacgagagctgatggtttaaaagtggcagtttaccctgaacttggtttctctcctgccaccatgtaagacgtgcccttctttcccttcccttgtgccaagattgtaagtttcctgagacctctgcagccatgtggaactgtgagtcagtcaaacatcttttgtttataaattacccagtctcaagcagtaacttcatagcagtgtgaaaacagactaattcatgtgggaaaaaccagattttgatgactgagatgaaaagtgattcagaggagttggactttgaagaagttttagaaatatcttaacaaaagtagtttgcttacttctttatgcacaagagggatacatgatgaaaacatacctttcaaagagctttttcaatgtatataaaagtgctaagtgttaagctattatttcaagattagcaggatttttttgtggtaggatataaaataatggagtgttttacagttggtggtgattagattcaatgatatatatattaagttggtggtagagattgtgttagatattcaagaaaatgccaatgtagtgggaaaatatggtttcgaagctgtggcagccatgggcacctctcagatagaggaaggaggagtgacattgactatcaggcccagctgctctgtggtacagttgtgttagtgtgaaagccatgcctcccacgttctgcctatctttgtctgttttctgttgcttataacagaatacctgcaactaggtaaataaaaggaatttgtttcttacagttatggaggctgagaagtccaagagtgggggacccaggtctctcttcctttttctttctataaagtcaccagtctactcctgtgataacccattaatccattaactcattaggctgggaatggtggcttacacctgtagtcccagcactttgggaggtgaggcacgaggattgcttgagcccaggagttcaaaaccagtctgggcaacataatgagaccccatttctgcaggggcagggggaagccaggtgtggtggtggcacgcatctgtaggcccagctacttgggaggctgaggtgtgaggattgcttgagcctgggaggttgaggctgcagagagctattattgtgccactgcactctagagtctgggtgatagagtgagaccccatctcaaaaaaattaataaaattcattaacccattaattcatcagtggatgaatccattcatcttttaaggccccacctctcaataatgccagactggggattaagtttcaacttgtttgaatgtcccaagccttctaacggcagccttgttagacttaccccagaatggcactgcagcctcacccacacacacaaacacacagacacatccacccacccacactcacacccacacccatacacatacccacccacttccacccgcacacccacccacctgcccccaccctcacacccatacacacccacccatccggcttgctttccttccctgtctccttcccctgggtcagacctgcatcactgtctgatggcccctccagtcttccctggctccctccccattttctctcacagatgtttcccctaataaatttcttgtgtgtctcatcctgtcttggtgtctgcttcttagaggacctggactaacaaaaatgaaccatttggagtaaaagattcagggtacttagcattgtcattcatcggttgctattatcactataagcagaaaatgttgcttttatgtagaaatgctgttctttaaattatctaaatttataggagaatcccacttcatttataaatattttgagtgcctactatgagccaccgtgttctcacacctgaggatacaatgaggaaacccttgtccagagtgctcagctagtggccgcctggtagagaatgagttcccaagagtttttcaaccctgcagcccttgttttttactgttgactgccacttttttctcttaacccgtgcatcacagatgggctggaaagaaaagcttttgtcattgattaaagccattcttttctgaatgtttcttttcttctctcacattttttctttttcttttccttttcccttaagtcttgctctgtcgcccaggctggagtgcagtggcaggatcttggctcactgcagcctctgcctcccaggttccagagattttcctgcctcagtctccctgagtagctggggttacaggcatgtgccaccatgcctggctaaattttgtatttttagtagagacagggtttcaccatgttggccaggctggtctcaaactcctgacctcaggtgatctgcccgccttggcctcccaaagtgctgggattacaggcatgagccactgcgcctggcctattttattttcttgatttaacagtttattgccttagtatgcacgaggttccatttctagctgtgccactgagtcataccattcacttcagaaactaaaattttctcttatgtaaaactaaaaaaaaattcaaaattgcctcatgaaactttaatttctatggggtttttatttcctctcataataatattcttcccaagtatttattttgtttaaaatatcgaagcgaggttcttactgtcccttatgcacagagggaaggaagatcaagtttcagcatctgctgcatatccttattaggcagactcattccttaaatactcagtagcttttgttttatgattctcattttttcctaagtgtacttaaaaacaaatctttacaggtagattgtgtttgatttaaataatctgaataaaatttctgctatcttttttcagttaatgtccttcagaatggatgctagcttttcttttgtgggaggcaaacacaccctaacatacttgttcgtagaagatagatactaagagaatcgtagactttggtgatacattgacctttttttttatttttattttttgagagagccaggtcataggcagatattcagggaattaaatcagagaccagaagttgtcagaatttcagccttaatcctctttaataggactaggtttcaagtttttcacagttcaggattgaaagttgataaaattcttactggggacattttattcttggattatctgtatgaaagcagaagtgtgataattgaactagtcgatttgggatatatactttaaaatcatagtttctagcttattatgtgagtcgtctttggtctgaaagaatgaggcattattcaacagccatttcctattaatcggctcctgattttcaagtttgaaccctgtggaattaatttatagcacctgagcacctgtgtcccagttagagctttgtgcgtgggttccttaaatcttaagtaccaagtaagctagtacttagctaatgagtgtgagctattgccatcataaaattgaatttcgtttttacattagtttctctactgggaaaattagattagcttgagctgtgcttgaaaataaaataccatactgggatttgttgggaagttacaattgcttcaagtatgatgtgcctttttttttttaaattgttttaggtagggagaaagtattattcctggctttatagttgagaatattcaggtaacaaaaggaaattgttattttctgtcatctaaaaatagaactagttagggcagagccaaaatgaaaacacgttggcctcctatttttccgtgctggagggccctcgtagcgaaatcgattgtgaaactttttcactttttgtcaacattagtcttttgactcttgttctttctcttatgtcaggtattaaagtgggggaactttattggccatcttaatctttctatttaaacttgagcctagaatgatggggaaggtataggccgggggaggctggatagatggagaaagaggtaccaaagggtgagtgtggagggagagtgatgtaattaattgataatgaattggtttaattaggggaactcttgtgttaggagtatagagaaaagaatacgaaagcattttgtcaagattgtttatacggttctgaaattctaaaaaatactaatcctttattagtctggattctcaattgcaagcactagctagtttgaacataaaggaaattcattaaagggtattgggtttcttgtagtatctttaagagatgtggggaaccaggaatgatgcccaggttgtaccacagagctgggcttagagcagatgccactattgctactggatgtggacactacagtttgcaccaagagcctcactgccctgtggctgttggaagaactgctgcctctggaaattagactagttgctgccacctcgctagaatctctggtcactgtttttttttttttttttttaaagcagtagcttttgaatccaagtcttggatgggaccatctcattagtggaaccctagctaggtgtcattaccttactgcaagccagtgtctgtcatttttggcttttatggtgggaggtggactttgtttcagtgggaaggagaattcctcaaacataggaaggggtttcaagtgctgggcagcccaaaaggactgatgttcctgtatgtgcctgattgtaagacaacattattttcccagaagattaaacataataaaattgtttcagacaacttgaacacgtatacttttaggtatgcatatgtacatctgctagataatcagatgtctcccttcatcatttacttgattaaatatgtgtccatatttaaaatcaaataataggcaaagtcagcatatattttagaaacattttctgcacttatttaataaaaaatttgtcccagctcttggcacctttgagattagtatattcatcatggatacattctgaatttttcagtacagctttccagagcattgatggccacatctgcctgagttctttgagctatagcacctaaaatctttctgatgctttcactggaaattttatctcaagccaaaagtatatgttagcagcccatttggacagtctctttaaaaaacttattcctgaacctggcacagtggcttgaatccataattccagctacttaggaggctgaggcaggaggattgtttcagcccatgatttcgaggctgtagtgatctgttatcacaccattgcactccaagcctgggtgacagagtgagacccttgtctcttaaaaaaaaacacacacacacacacaccaaagacttaactctgggatatgttttcatgatttctcttcctcctcttcttcttcacagggtctaactgttgcttgggctggagtgcagtggtgtagtcactgctccctgcagcctcaacctctcggcctcaactagcctcccacctcagcctcctgggtagctgagactacagatgcatgccaccccacctagttaattttctgtattctttatagagatggggtttatgccttgttgcccaggctatgatttgtttaatgtaaccactgatcttattccttttaaagtgagctttataaaattactgaatacaaaattttgaagtcatctctggaattgtaactaaatatcttaaatttcttagtgtccctttgtttttgtaacttagtcctgtttgtaatctctaagtatctgaaactaaatgtgattagggctattttaggctaagattcctcaaacagttgttgatcaaaataatgggaaagtccactcctttagaagactcttaagaactcttacacgaggcaagttcttttttttcctaacagatcattttgggaaaaagattcctttatgtttagatctatcgtatctatctatctatctatctatctatctatctatctatctatctatctgtctgtctgtctatgtatatataaagtttctaggcaccatttaagattccgtttcaaggaaaacaagagctgtgtttttgctgaatggtttctttgctgctattcttgacattagaattggaaaacagaattttccctttagtttaatgaaatgggaagtatctggaaggtcatgggagaaaataggggagatattcctttgttctcagattatgcattcctctggggtcaaaaacacgtggaatccaggcttaaaataatgagtgttctggggaacggatgtaaaattccttctgtttcactatactcagcctatccttgttagtactgagtgattagaaaggcatgatttagtagttatactgacttactcagttttacctagactgagactttagaaaattgttactaaagatactataggatgtaggtatgcctttgttgtgtttttactgggtatggggttatagccctaagtcctattgtctttagaatttatgacatcagaacttagactttgatttccagtgtgggggaatgtaaagttgttggagtggttcctccccacagtggagtctgattctctgcaggttggttgttattctcaacagattttttagctctagcgtggactgtggaggatagattaagataacataactttcctttcctttttagacatttaagatccttacatccgaatgtctgacgaaaaaggatttcagacttgagtaattgtgggaaacattttaatcctccacactgttacataatactctttttactttgaattgtgaagttctaatggattctctagtttgctgttgtagcatgattctcaaaactacagcatggaaatgtactttgtacttctgtgtctcccagctcatttagaatcccagattgatagagatggatgaggacctccgctgtcctcttggccagctttctcccagtgcaggcatgtgtgagagggtattcctggtcatgggtcatctagtctctgcttggttatgtggagggagctggaggtcaccaccttgccaggcagcctgtttcattatagttctcttgagtccctatgataggaaacccaaatctgctactctgcagcttctacccatcaaacctggctttgctccctttaagcaaatcagaatgattttttttcttctctcatgcagtacccatttaaatatttaaagacagctttcatgtttccactaaatgttctcttcctccccactcacatgaaacatctagttttttttatttcttcctcctaaacctttttagcattctggttacattcctgctttaccccagttggaaatggctgttttaaaatgtggtaaccatgctattgaggtaagctctaatctaacgggggatgcagtcgagtgcttaccttgtttggattcaggcggtatgtgtcatcagtgtatgttacagggtcaatttgtggctccattggcttatgttaaactttcagttaagagaacattttaggagatttgagcccagtatgaaattcatgtgacctgttctcgagacatcttgcacacctgagcagttgcctttcagcatcctgtagattgcttatcccaggcaaatcctaacggcgctacttttgagtccctctctttagctcgagagctccttgaactgtgattcttttatccagcattccttcttccttcccaacttctgattggctgcaaatattgtaaatgtatattttttaaaaatacaagataagcgtaagagcattgttttgccatgatactcaagatgatcctttcaggcagggtttggcaaacagtgacccatgggcctgacctaccttgcttcctctttttgtaagtcaagtttcgttggaacacacttggacccatcattcatatgctgtttgtggctgcttttgtgctaccacagcagagatgagtagttggaactgcagctgcatggctgcaaagcctaaattatttactacctggtcttttatggaaaaagttggctgacttctgctgtgaggagagagcatctgattatttcatgttcaagaagcttccttttgtttccaagcagagctatccaaaaccctttccaaggctcactagccaaggcattttgcgacttcttttcttggctggttcaagtattttataggaatatgattatgtaatctgtatgtgtggttataaaatcacattctgtacttgttctcttatctaatttctaatatgttagtatttgaaaacttctcaatattattacttcatccatctccttgacattgggaaactgtcatcactgtaaattgccttttaagttttagggacagtcctagatttggtattcatttgttgctggggaagaaggatcatgtttcaccattaggaaacatcagtaacacttactactaacaaatattatataatatttctgtgaaattatagcaggaagtgagagattccgtggagcttccagtctattttgagaaaaggaaattcttgttgctcagttgacattgccttattgaaacatttattggcttctttattattttgttcttaaatataatttttaggttcagtttagaagttataaaatcaggctttgctaaagaaggaaaatcataattttaagctcttcaaagtatttttaataaaaaagttttttataaatgagttggatatagtgttatttgccacaactactactatccttgttttggaaatttgcttaccgatctgaagatagtaaggcagaaacccttatattcttcctcccacgtcacccccaagatggagtcttgctctgtcacccatgctagagtgcagtggtgcaatcttggctcactgcaaccactgccttctgggtttgagcgattcttcctgcctcagccttatgagtagctgggattacaggtgcctgccaccatgcccggctaattttgttgtatttttagtagagatggaatttcaccatattgaccagctggtctcaaactcctgacctcaagtgatccacccgcctcggcctccaaaagcgctagggttatggggtgtgagccaccatgcctggccgtgaaacccttatattctttttctactctagtgttagcctttggggctcagacggatattgcattgaattctccaaatgaaggaaaaatataatgacctaagattgctcttgtgtaatctttgtagcctggttcttttggtggaagacagtgtttactccagagtatggagttttggggttcttattttaaaatgccttcatgtgtctatattatttataacctacctctactttctgagcatttcctgggtcccattctgatggctaatggagaccatccgatatctctagccttgtctcgtgatcctctctgatttcctcatctgctttagtgacaccgagctgcttaggttccatgccctgaaattgctgttttcccctctccacatggaaggcctttgcctggagaacaccgtccctctgtttcaggctgagctgtgcataatctccttcaggaagtcttctcttacccagggggccttcctcctctgctccccagaagctctgcgcagcttgccagcactttgtctgccacgtcatactgtgctgacgtgttcacatctcttagaaacactcgcctgggatgaactcagccacccaccttttcccttccttgctggagaaaatcccacaataaggcagatgataacttcataaactcctcctcacctatctcaaaaggacttcttgtttctctaagaagtgttgtctcatttgtaatgattctttcattcattcttcagttagttgggcgtgaaacttctcatgtccaaactctctgcaagtgaccttgttttgtactttatggaaaaaatagccatttggtagcaactctcagctttttgtcatgaagcccacaaacccgtttgtactgggcaccccttttctccttctatcacagggaaggaaggattttgactcgtatgacaggccaaccctccatgcatgctcagcatcccatctcctcccgtgtcagagattttgaaccattctttctggattcttcacatgggcatttagacatgctctcatctcttaaataccagctgtcttaaaagaatacatgcctttactttatggcatgttctctttcagcagtcatcctctctctctactgccccacctggtcattctttgaggaagggttgttccccacgtggtctcacctgtcagtcataaatcaactccagcccagccctttctgccaccttgccatggatattgctgagctctcattctttctttaaaacgtctctgcagcccacacagctgaactccttttttttctttttctttttctttttctttgagacggagtttcgctgtgttgcccaggctggagtgcagtggcacgatctcagctcaccgcaacctctgcctcctgggttcaagcgattctcctacctcagcctcccgagtagctgggattacaggcactgcccggctaattttgtacttttagtagagacaaggtttctccatgttggtcaggctggtctcaaactcctgacctcaggtgatccacctgcctcggcctcccaaagtgggattacaggcgtgagccactgcacccggcctgaacccctttcttcttttatccaacaccttggtagctttctccagtttcattgccatcgtttacctctgttctttcatttcctgatctgagtacttggtctgagacatttccatttttctaccgtcctacctctctacttgcatgacttcaaatgccatctacttgctgatgaggacaaaattggtatctctgacctaggtgtctcttctaggctgtggacctgtgtctctgacagctggttttactaagatcttgggcgtttctcagcatctgggatttaacatgagcccttagtgtgtgctcccagctgctttccctcaagattttccctgttgcagtaaatagtgtcctttattttttatttttaaatttatttttatttttaggatttgtgagtacataataggtatatatatttatggggttatattagatattttgatagaggcgtgcaatgtataatagtcacatcatggaaaatagggtatccatccgttcaagcatttatcctttgtgttacaatctaactatactcttttagttattttaagatgtacaattaaattattttgagtatggtcactctgttgtgttatcaaatactaggtatcattcattctttcaaactatttttttgtacccattaaccatccctacctcccccctactatacttcccagcttctggtaacaacccttctactctctatctccatgagttcaattgttttgatttttgcatcccacaaataagtgagaacatgtgatgcttgtctgtctgtgcctggcaataagtagaattgttatctcttcatttgttcatgccagaaatctgggagggatcctggaaatcttcaccttttccattcggtcaatctctcattactttgacaccacctgcaaatatctctcaaatctgtctacttgtctttacttctgttgttggttgccttcatttgaaccaccgccatctcttcgtgtaccactctagaagcctcctaacgagtctgtcttccggttttctgtacctttcatctctccctcagcagccagagtaatcttgaaaagctctaattatcattctgtcaattcactgcttgaaaaccctcctgtggctttccactgtacccccaataaaatgctaacctttcccagagcccacaaggcccggcacgctctgatcccctgccatcactcagcattacaggctcacttcattgctccttacgcttcagccattctggccttttgacattccctgtaatgctcaaactcctcaccttcatcctttgcctctgctgatctcagcaggaaacaatttcccttgccctttgcaccacggattccttctcaccttttaggttttagcttaaatgtcactactttgaagaagctctctttgcacacatttctccttagacctcctctaatgcattcctcactgtactcctacttttcttcattggaaggaattactagaatgtgcgcttatatatctccttaggtgttcatgtatctggcttacatcttctctactgaacagtaatttccacgaaggcagggggctgtgcttgttttgttcatagctgtatccccatcacctggcattgcatgcttaacagctgtttatctcgtaaaatagataaatatttaaagtttattaagatggcaactttggagaagcacctctttggtacttttattgccatgttgcatggtggttatgcttggtgggcccagacctacatgacttggaatccctattcctatcttctgtgaacttgagcagttgttagcttctgtgatccctgcagttcattctgggccgacttctttcttgagtgtaccagtttcacagaagacatattatatggaggtttatttgggatcactagttgggtagatccagatgtgggagcttaaaaaatgacacaggtgctcatgtaagtgtgccttaagttatctatgagacactgtgtgtaaattcatgcactgtgaaaacgtatgctagcacttcttgtatctgtactctcaaatggaatgtgggacattccatattatttggggagtcaggattcctggctggtggtgctttgtaggactctttggtttgccattgctgtaggtcacatggtctaaaatgtagagaggataaaatgatattttgaaagatgatcccttttccctgactagttgttgctcttaattctttcttttagagctttgttgccccagctattttacacccaagcagcaaattatccaggtgggagtgaggggaatccaggggtcagcctggggtagaaagttgaaactgagcatcctgaatgtgggcatagtcgcttattttgagtgttccctacgttagagtatgaaggtctctttgggagaaaccctcacataatgaaacactgctgaggagcctttggttacattaagaatcttttcctattccaaatcacttattttttctgtaatgttaagcttggatttttgatcacctttctaaaaagagggatggcacattcttaaatagtgtttcgagattttcttttctattttggatatttctggtctcctggaagcagagggtgagaagccactactctcaccactatattgttactaagtatgttttcttttgatgaatattttcttttatttgcattttcagcattttgtggcttaacatgaaaatccccaaaccagccaacataaaaagaaaatgtggttgtggctggagtttgtgtgtgtggcttctctcatgtgagcttccctgatgtcatgtttgctagcacgcccaagcatttgactttttcgtgagcctccagtgactctactttgctaatataccttaaatccttaggaggtttctgtaatgaagggcagactggttgtatttgaacaagtagctacagtcctagttctttacataatgtagtctgattatcaataaaggaatgtaattgaattttaaatttctaaggagggggaaggaaaaaaacaatctcaaacagaagtgttctgttaatgaatgtgatagacccctttgttgtttacagacagccgtcttgctgttttgtggaagagagttggggctgtgttgtacatttcactggcaatctgcccacctcctcttccctgaaaatatttatggagttctagtgctttaataagttgagaagtgatttaattgttgcattggcagagtgagataaagccgttaaatacgttcattttctttctgggtgggatggaagagggaaatgaaatactaattttttcctttttggaaacctaatgctgtgctcttttgttatcactcttgttctctaggcattaagtgtaactgaaaccctgattaaacccttggaaaaattcagaaaagagcaacttggagctgtaaaggtttgtgtctaatttgaatacactcagaaaacatagatgcctctgctgcttcatggtacactttattcacatttggcagctttgaaggagatgccggagcaaaccatctgttgttttgtttgaaatgtgcttttccccctttgggggatatggaattggaaacaaaacaaaaacacctggacaagatggtaaaacctctagtaatcttcttgggctacacctttccatatagagttttaaaaatacctgtaaccaaacaacacatttgctctgaatagaaggagcttattactggggggagtgtagttatttctgtgcgcacctcagttttatggaggagtgtagcattacagtagggtttaagattatagacgctgccacactgtgatgccgttgaaactaggaagagactattaagttactgggatgtaatttccttcaatttaacaaaaatttattgagcctctattatgtgcaagtattgttatggtattgtgcattatattgtgtgttgtatagtactgtgctggggattcaaaggtgagtgaaccacagactttgtacttaagtatctgggatttaaccgtgatttccaggaataatgcagtggttttgccacaaggagcctgagatatatttagcaacttatttaaaatgtgcaatctgagctttgaaattaccccagagaaataatttccaccggtctttcctgaattttgtgtatgtacttgagaaagaaaaagtaacatttgcatgctgttgaccatttttggcttggcccaaggagaggggaattaacatcaattttaggtagggaagggagtttttatatttgtatttttttccccccacgtggctggggatgtgagttttttttttttttctcttcctaaaagaaatgactaaaatcccttggtggaaataaacactgtggcctcagtagcttaaccacacagatgaacccaaggagttccagctctgtaattgctgtttatggaatgaattctcatttaagtgacttgtgaaaatattagacatttctttttggcataccgtattacagtttttaatgaagggctacgaattgaggctcagaccctgtgaacagtgggagatcattgggggcaccaccccaggctccttccttggatagtttgccgtgctgcaggcagctgggttgtcccctctggctttgcagcaggagatcggaggtcagctttcacttctgcgaccttgactaagtaattggctttagtttcttatatgtaaaatgaaggacttgggggatctgactactgttttatagttttatgattttgttttgattgtgtctctttaagctctttaaagcttgttgcattttggttcattctcttttaacatttcattggcaggtattccgtgtaaacaacatccatttcttatttttctcatttgaattggatggtgctatatgtgtgacggttatattatggaaatgaaaattgagtgcgagtgaatatatttacttttacttgccatctattctactggaatttagaaatgtctgaccttgaatcttctattgactcattttcccccctaaactttccagcttctgatgttaacatttgttcagagtatatcctgcaaagcaacttgcacaataagtaatccttttaaaaggagaaatggttacaatagtttattctgtgctttgagctgtttaatgaccaaattctttcctgaagtcctatttctgtatccctccctgttcttctggcttcaagtttataaagagtttatgttatgtgcagtcttgctcagtacagtatgtgtgttgactgttgtacctatggatgtcacctgtgaagagcccgtcattgtaggtcatagggagaagccctttttcctggtagttttgtgtaccataataaacagtagagaaaggtggttgtctgtgttctgtaatgatatgtaaactatgtaaacatctgtccttttcattaggttgttaaatctttaaaagactctgcttttttttttttttttaaattctctaccagcccctaccctgccttaatacataaagtatctaataaatagcctatccaactgataattctagaagaaacaggaaagggcttaagtttgggtatttgaattactttccacatctgtgctgcctaaacattcagtcatattttgtcaagcacacagtcttgttcctctgattaaatctgcttacatgggatacttcaaaaagactttactctcttaggttaaagagctttttgtaaacagcataaagcagttttcacgtggggatttaagaaaaaggtctctaaaagttgaccacatcagaatttttagatatgggggtcaacattttgatctttccccgtctcctgtttcccatctgataatgttgtagcccttgcctgaagctctttcagttccctgtgcttttaccttctccggtttccagaagcccagttccatgtttaactgtggtttaaatctattctaagtggctaggtggtttttgtaaattggattttgaaaagcccccaggtattgtctactgttttgcttatatttggatatgctctccttgagccctatctgtttggtttggacgtatccctccattttatgggttctgctgcattttcttatgtgcttgctaggttctagcttttgttcaaaaagcccttttgctatcacagtgagaggtgaagccagctgggcttctgggtcgggtggggacttggagaacttttctgtctagctaaaggattgtaaacgcaccaatcagcgctctgtatctagccaaaggtttgtaaatgcaccaatcagcactctgtaaaaacacaccaaccagcactctgtgtctagccaaaggtttgtaaatgcaccaatcagcactctgtaaaaatgcaccaatcagtgctctttgtctagctaatggtttgtaaatgcaccaatcagcactctgtaaaaatggaccaatcagcactctgtaaaatggattaatcagcgctctgtaaaatgaaccaatcagcaggccgtggacggggccaagtaagggaataaaagctggccatccaagccagcaggggcaatgcttgggtcccttcccatgctgtggaagctttgttctttcactgtttgcaataaatctggctgctgctcactctttgggtccacactacctttatgagctgtaacactcaccacgaaggtctgcagcttcactcctgaagccaggagaccatgaacccagcgggaggaacagacaactctctatgcgccacctttaagagctgtaacagtcactgcaaaggtctgcggcttcactcctaagtcagcaagaccacgaacccaccagaaggaagaaactccggacacatctgaacatctgaagggacaaactccggacacaccatctttaagaactgtaacactcactgcgagggtccgcggcttcgttcttgaattcagtgagaccaagaacccaccagaaggaaccaattctggacacaacaggacacaggttgttgcctgatgcatcacgtcaagagtttctctaaggcctagctgagttcttattttcttttgaagctccttcaccctttttgagcttggcacttattgccaaatgtcccacaggactttgtgggtagctacaggaaccagtacagatcctgaacaacttaggggccaagtatgttgaacaaaaactctgagaaataccagaacgtgataagagttaacatgggataaattgcttttttggacatttgaccaagtaatgaaaatatgggtttgggcaagcagcagcacacagatgacaggtggatgcaactaactggattgagaatggaatctattcagatgctatcttggaaagagccaattataattttatccaaatagaagaagaattttaggcagaaaacttaatagatgttcatttcacaaattatgacttatcacctaagctcattaccagacctctactccaaatttctttccaagactatgactaataatttttttttttttttaaaatacaggatttcattctgttgtccaggctgggctgcagccttgaactcctgggtcagatgatctgagcagccaggactacagatgcctgccaccatgcatggctaattttaaaattatttttgtagagacggtctctctgtgttgcccaggctggtcttgaactcctgggctcaattgatcctcctgcctcggccttccaaagttctgggattacaggcttgagccactgtgcccagcctaatgaatacattttaaatacagacttccaaagattctataaattactacaaaacatgagtaaaacttaaacctgtctggataatttctcatattacattgtatttaatagagcagaaacaatattgatttagtttaattacatttctttcattcagtaataaaacacactagtgcctatcatacagcatagtattagaggccctgagatacaactaggaattacaacactggccagccttcaggaagttagcaactttttgtgagactgtcaaaaaagcaataaaaatatattgtggaaagtgctgtaatagcggtaagcataggtgtcctgggatgtactctaccatctcatctttggagcaccagaaagtctttcaggaagagttaattcttcctggtttgaatcctctttcggtgccttaattagccatgtgatttgggacaagtgacttaaggcctctaagtctcagtttcctggtctgtaaaatgagacttacgacacttgtctcaggaggttattgtgagagttgagtgaatttgataatgtacctgaagtgtctagtttgggacctggtatccatagagtaattttattatcccattcatgacttgctccccatcaccttgccaaacaggagttgctcagctttttgtccattctctgcattctgggtttaggggtgacaagccatagcatgtggcttatgacctttatggacaaatagtgctaaggcactggattagtgactctggagccaccactgaggaaccgaggtggcactttgccagcgttggtgctgctgcagtcctgtgctggccgttcacttgtgctctgacaggtgtctgccaggcacccttctgggtctggattcaagtgctccattctgtgaggatgaagttgaattctcatctctttagagaggctagaggagcttaaaggaaaggggtgggttggggtaggatagggcaaatgaagtgtcaagtaggaacgagtgacacttgccttgggagttaagggagggtgtgccttctccctgctggagtggggagtcctcacttaacattatcagtaggttcttggaaactgaattgaagcaaagcaacacataaggaagccagttttaccatgggccgattgacgtaaacaaaagtttttatgtcatatttctggtctcagaacatcaccaaactttttttttttttttttttttttttaaatggagcggagtttcgcccttgtcacccaggctggagtagaatggcatgatcttggctcactacaatctccgccacccaagttcaagtgattctcgtgcctcagcctcccaagtagctgggattacagacatgcgccagcacgccaggctaattttgtatttttagtagagatggggggtttcaccatgttggtcaggctgatttcaaactcctgacctcaacatcaccaaacttctcaataccacaacacttttaatattaaatattgaaataaatgtgagctatacatacatttaagaaagattaatgaaaacaagataatcatttactcactcctgttcagggtcgcaggtggctggagcccatttcagcagctcagagtgcaaggtggacaccagccttggacagggcatgatcccacactcgctcacacagtactatttagacatgctggtgaactgacctaagagatgtgggaggaaatagtagatacccagaaggaatccacacaggcacgggagaacctgcagactccacacggacagtggccctggccacgaatcggtttttatttttcccttattaatgttataatgaaatgatgctattcaaggacctgccatatttaagttcttctctagacgagtccaacagtaaacattatttaattttgtagtttgaaaataagccttttccatctcctcatcctaaacaattggaaaataaagaaaattcaaaaaaagtcatctagtaacaaattctttcctcttctaaagcaaaataatctggtaccctatagaaaaatgggcaattcacaattatgtttaaacttttatgaattctttgtgttctttatccatttttcagtggaagcattattgtgtgttttttgcaaaaaactgcttaatgaagaatatattttgtgttacaaatgtttccctacgttcttacatattggttgtaatcctcccccctttgctgtgtgccctttgcttgattattatgattttttttttatattggcaagttcttatggcttctttctttccttttttgcttagaagatccttctctattctgagatttgttgaaaatactctctatggcttcattgtttacttgtgactctttcaatccatctggaattaattttgatatgagatgaggttctctttctgcttcccagtaaacagtcatgccagcaccaatggttgaatcgtctcttcctttttttaaacccagtgatgtgtaatgacaaatttatatagtttttgacctctaatggtattcagaagatctggttatttgaattggggttcttaggttcttctcttctaccatttatataacgtatgtcttttttttgacccaaaatgctgttctaagtagtagctctacttttaaaaaaggttttgcatgtgcaattttataacagattagaaagctgacttctaccatattcaacttataaattttgtttggcttcctcgtgttgttacaattaagaaaaaatgtgttgccaccataaaaatcattggatttttcagcagttccagagaaatcagaagacatggccaacatactgggcttgtgttctcaagaggcaaaaatgttctggcgctgagtaatggctgccttcttctctggagtagacgaggactatctggttttcaatgcctaccactcctgattgcatttctctcccagcctgtttcactcattagattactgcctggcccagactcatttcagtttttgtaatgtctgatttataagaaaagttttcatattgtatttaacttgatccttgttggaactttttggattacgctgttacatttatatatttttttctgtaatgcagtattgggggaaaaaaaaagctccattctttattgaatgctacttgaatagtttcctttgaaatttgtatcatttcagcacaagaaatcatatgagcacaaagaaacaataatactctataatgacattaagaacaaatgcaggaagaaataattacctgcgttttaagattcagaaacaaaacacagcagcatttgtataataccataccatatatggacgaagatatttctattctaagcttggtgggtgtgatgttgttattgttgtttcttggctaaattctttcttcataaaggcttgatgtctcctttttctttcattcccaactttacccacatgttgattttcatagccttctattgctgagtgtgctgggtgttttgactgctgattaaagcgtcaccccttcctcggcccctttctgtgattcagattaaatcaaataaggtggtaaaaatgttttccatgttcctggtaagtactagtctgcagtgatagtgcttcttactatgtgaccttgctttgcagcagtcttgtgggcaaatgcaggggcctgacttccatttgtcttttgtttaagtctgagaaacagatgctcagagaatgtttgtgaccttgctacagagtcacagagtaatgagtggctaggactgcagcttgggtcttctgacacctaattcagtgtgtacttcacagcatcaactttttaaaatagtggacatttttaggtaatgggcatctgtttgtttcagtttattttctgttagttgttaaaatagtggaagagcataatgaaaagcagaaaagagagtaactatgtaatatcaatacattggacttagttgtaaattaaaaaaacctagagcgtaaagaaaaataaagtcttctgatcctctgtatcaacaaaagagtgactattaagtaaaagaggttaaaatacaacttctgcttttttttggttccatttctacacatgggtgaaccataggatcacagaattttaggtctggatctatgaggcagttaaagaaaagtccctgatctttttggtaagaaaacttaggttctatattgtcagatggttttttttttttttttttttttaagttgtgcagctagttggtaattaaccttggagtagaaaagggaagaaacctcagttcctgagtctctcctcctccatcagtgtgggggagttaattgagggcttttagatgacctgacaggggacatactgtcctgggtttccagaagaacagcgtgtggtcccatgtggtgaaaaaagataaataaaagaagtagagaattaacatgctttgtttaatctctttgcctaacaggaaggaaatcataccagaaaaggctggaatagttcattatttttgctttggaaaatacaagttggaaaattagggaagagaatgttccttttttaggaggtgtggagagttagggagaatttgaaattaatggaaacattttgacagcatgaggacatggtgtgctctcattgatactcaagaatgtttattaaaaatctgtcaagttggctgacagctttaggggagacacccatcttctctgcatttataaatgtgtatacttattttctcaaaaagcttctatagcaaaaggaatgcaagtatgtcctaattctagacagtacctaagaaatgtttgtgatgttaaccaaagggtgagtactggtatatcaatattattttaggccctgttgacctattgatacgtattttaaatagcgttacagaaatcactggaaaggtttgggaaagtagatgacatttctggtagacaatcttattgctatacaggttgatcatcctgaatctgaaatccgatatgctccaaaatttgaaatgacactacaagtggaaaattccacacctggcctcttgctctctgatggttcagtgtacataagctttatttcatgtacaaaattattaaaaatattgtataaaattacctttaggctatgtgtgataggtgtatacaaaacagaaatgaatttcacgtttagacttaggccccatacccaagatacctctctttgtatacacagatattccaaaattcaaaaatatccaaaaatctctaccacttctggttctaagcatttcagagaagggatacttaacctgtattcatactggaccattagggaagatctttcccaagatgttttttttccaacactgattatgtattatgattttttgaaaatctagagtaaaacatactgattgattgagacagagtctcaccctgttgcccaggctggagtgcagtggtgtgatctcgattcactgcaacctccgcctctggggttcaagtgattctcacgcctcagcctcctgagtagctgggattacaggtgtgtgccaccacaccctgctaacttttgtatttttagtagggacgggatttcaccacgatagctggctggtctcgaactcctgacctcaggtgatccgcccgtcttggcctctcaaagtgctgagattacaggtgtgagccactggcctattattccattttaaacgaattccacgtctgtgccaaaatctggagcaagtttgcttttttaagctttatgttatttttcttacgtattttgtttcattcggttggtgaggggtgagtgacatggaattaatttttaacattgctaagtctgaagaactgaaaaataacataggcttggaaaaaagtccattaaaggaagaaataaaagtgtctcttctatcctaatgctgtcttgatgattaagcagtaggcttggtacagatatgtttttttagatagctttatcacattcagagtggtgctttgttttattttcagatatttttcataatttgagcttcccagtggattaaccatgtgtatccttttgtttctgtttaatcatagtttttttttttatttgtaggaagaaaaaaagaagtttgacaaagagacagaaaagaattatagtctaattgataaacatttgaatttatcagcaaaaaagaaagactcacatttacaagaggtataattttttatttttctgttacgttttcaaaatttgataagcaatacatgtcttttaaaaatgtgctttaatttggataacttttcatctggcattatatagagataacaaaaagtgaacaggtattgtcataaattaagaaaaaagtccttgtgaaacaagaaaaaataatgaatacatcttatagtgattaatgagctatggattcatagtagtaaaatttttgtttctgagcattattttataggaacataactttaaaccagcattagtgaagaacagatatattatttgcaggaatagatcaattaattggcttttgggagttcttgaagaaatgaattgaatttaataagctcatataccattatgcgtttatgtgaaggcagcattaatcttatttaatgctgaggattcaggaggttcaactttgttggaaagagagcatctgttttacttgtattaatagactcatttattttggaggcagccatatgtaagcaggaaggaatttatattttatttttcattttctctttgtttacttctaaatcccctgccatttgtttctctcactcacacacttggatggaaactcagttgtttacaattcaaaacaaaatgcttttattaaaaataatgctgtttgccattgttaggatttagtctcatcccacaaaattgtattttttttcttgtttttttaacacataaggaatctggacattatgtactactgtcataaacacttattgaagtattatcaaaatgacacagtattaagtcttgtgtaaacctggattatatttaaatgttagctatttagttacatactctgtgtgtgtatggtttgtttgacattatccacatgtgactttttcttttgtgtctctaatacctttgactgacatttggatggcacttgacagttcataaaagagaaaagagcttttacacctcttcgtccttactgcagtactttgggtagggctctgttctctccttgttgcatattattgtgtgctccctcatctcctgccctctgtcaattttgagatgacagctgcagcttttacaggccccctttatgctagcagttctctacctgtgtttgctctcacctccattttcaggtatccaaaaaaagatcttcattccccaagtgaatttccaaatccacttcactttctcattaggtatttcattttaaactttgcttaggcaacatctttggagtcaccttggccctttctcttacactccccatctagtccatcagtatgtcatctttagttccagaatataatcagagtgtgtccacttctcatgactcgctcttctccaaaccctcctaatggcttctccagaggccccagggccacaagatcctatatgttctgcacccaacccagctggggtcagcatagcatatactcagggccgttgtatttgttttccttctgcctggtatgttttcaacagggatccatgtgtctcaaaccttcaattactcttccaaatactctccactcagaggtcagtttattaaaagtttttcctgaccttcttatttagaatgtcccctttactctgctttatatttttttcatattccttttttttttttttttgagatggagttttgctcttgttgtccaggctggagtgcaatggttagatcttggctcactgcaacctccacctgccggattcaagcgattttcctgcctctgtctcctgtgtagctgggattacaggcgcccactaccacgcccagctaattttttgtatttttagtagagacaaggtttcatgatgttggccaggctgttcttgaactcctgacctcaggcgatccacccaccttggcctcccaaagtgctgggattacaggcacgagccacagggcccagcctattttttttcatagtcttaaaactgtttgacaaactgtgcatttgttacgtggcttcttccactacaatgtaagcttcttgaaggcaacaacattgtcttattcagtgttctatcttcagttcctagaacagtacctgttaaggagtaggtacttaatgtatatttattgaatgaactagtgtggagatgcttgtacagtgagctggggctccagcaatttatcagtcccaaggataattaacctctagaaacatgaagagatcctaacgatgaataatttgtttcatttaaattacatacactttttaatcttgctctgtttgctttttacaaacttacatgctctcactgaagcagccttctattttaagtgtgaagcccttaataggggggatgctttttacaggggaaaatgttaggtttggatattcattacttttgggagtggttaatgtaatgctaattttcagtgaattgagatgctcaagagattcataagagttgcagagaatgacactgaacaaaggcttagaaacgtacataattcattctctcctcttgcttcaattgaaaataacaggagaaggccgggcgtggtggctcacgcctgtaatcccagcactgtgggaggccgaggcgggtggatcacgagatcaggagatccagaccatcctggctaacatggtgaaaccccgtctctactaaaaatacaaaaaattagctgggtgtggtggcaggtgcctgtagtcccagctactcaggaggctgaggcaggagaatggcgtgaacccaggaggtggagcttgcagtgagccgagatggggccactgcactccagcctgggcgacagctccgtctcaaaaacaaaacaaaacaaaacaaaacaaaacaaaaaaaaccaggagaaaattgtggcatacaccatgctggctattttggcagttctctgaggccttgctgctatacctctatgtttattgggcataatagcttctacctccatccacacccctacattctacttaatagttgtactgtaacaagtattggatatttgagaaaattccatttctgtttatttttgaagtctattttttcttcccaagtagccaaatgatatttcagtataataataatctacttgagaagcagatttcctaaataactttatgtgagacttgtctactttcttacatatatttacagcaggaatggctagaaattagttgataatcaaattgaaattgtgtatttgttaaaaactagtgatttgcttggagtagtaaaacgtatagtgattgccttttagatttggtcaggctgaaggaaatcattttatgaccctagttacaacttggacgtccatggcattcttgtaagtgagggctgttgtcacggaatttttaggatgtctcttttccagccagaaatctctgtgtctggtgatgcctttgcccaagttttgctctggcccgctgggcttgttctgcctgctcttcctggcaggctgcactcggcttgtgctactggcctggatctcatgcctgccaagggcgagccaggcacggagtggcgaggagttcgtgagtgagttcagggtcatccggccactgtgcacagccgggcatgccgactgtggtggggcaggcagctccaggcacaggcactggctccgtgcaaggctgtggctggaccaggcatactgcaggtcgcttccattgtgggcactgggaacacggtggcacccggaaacttggagacaccaggaaccgcagagccccaaagaggatgtcacagccctggcttagggagcccctaggtctgggctccccgaagggccgcagctcttctctccttctcgtcgcccacaatgtagtgagcaggggagggggaggatcacccctgtttgtgttacagctctttcagtctggccattccttgggtcccaagttcttgtcccacatccaagaggaatgaggtatggagacaactggagggtgagcaaggtacaggggaacttcattgagcaacagaacagttctcaggagacctgaagtgagtagcctttttctgcaggcaggtcgacgtaatgagtgtccagctctcagtggagaggagacctgtagtgcatagctcctttccacaggcaggtcatcctgactagtggaggagacccccagagggttgctccttccaacagctggtagtccccatgtctttctgagtctggctgagtccagagtttttctgggctcagaagggaggaagtgtgctgattggcccatgcgcagccatgagtgggcctggaaaaagcaccgtaagttttcatcccaggctgcagactccacctagaactggcagcccagcggctcccaggcttcaggccatccctggcttgaaggtggggtttcaccagggacctgtctgtcccttcccacctaggaacctgtctcccgcagctgtcaacatgtcatccatggcgcccaaggtatttgtgccaagaggtgcctgcaggcccctgttaagctgctctcagccccctggcctccctcctgtgcttgttggcatccaaagtccagagggggccgagctggaggttggggttaccaggggcgctggcatgtcagaaccaccctgtgtgcatgcatacccggctgggtggcaacagtacctggacttggctacaactttgctccacactgcatcaggcgccgggagccgggagaggccagggagcaggagcaggcacttcttgagcctgctggtggggcagtgggccttcgccggcccccaagagcacagggatgccctggtccagagctgtggctgcacggctgcagctgtgtctgggagcatggggctcctgccctgataactctgtagaagttggggctcctgcctgtttctggcccccgcgggcaccatggagtgcgcagccctggctgcactttgccctctgcagctggtgtcctcacagcggctgctccagactggccgctgctgccatcattgccagtaatcccagggattctggtgatttaatcacagagcatgtggcacaacagttctggattttcagaacattaagggggtggtgatagaggttgactggtaatgcaagggtaattacagtagcaagaacaaccaggagagagaatttactaaaagataaaatcaaattgataaatctgatgctggtataaatttcttcaagagcctttgcagtaataacaaatgaggaaatcacccttcttatgtctttattaaatagtcaacaaaattacagtgtttttgctgggagatgtgccaactaactgctgatggctgaactatcaaactctggttattggaggcacaaaaatatgattcagatgagtgttaggtagaaattctcattttagcttagtaatatatattaaagtatttgctgaaatggtttttattacattttgaaatgtgtttcaaatgtgttaaatgcttttcaaaaacaacacatttttggttataaaacgtgaataaaatttcaataaaatgtatgattttattttaaagtctatggcccagtggtattaagtacattcacattgttttgcaactgtcaccaccatgcatctccagggctttttaaaaaatcttcccagactgcagctctgtacctattaacaataactctccattctcccctgctccagctcctggcagccgtcgttctgctttcagtttctatgaatttaactactctaggtgtctcatgtgagtgggatcatatagtatctgtccctttgtgactagtttatttcacttagcctgatgtcctcaaggttcatccatgttgtagtatgtatcagaatttccttcctgtctaaggctgaataatattctgttatacatatggattggctacattttatttactcatccatccatccatgggcattggggtcactttgccccctgctgctatgaacaggggtgtacacatatctgttcgagtctctgctttcagttcttttgggtatatgcccagctgtagaattgctgggtcatgtggtaatactatttttcatttgagggaaaaatttattttaattttttgctgggagttgtgcctgttaactgctggtggctgaactattgaattctggttaatgaagccacaaaaatatgattttgaggagtgttaggtagaaatgttcatgttagcttagtaacacgttatgtttcaatattattttacttaaagcactatttttcacagtgcttgtaccatcttgcattcccactaatgatgcacaagggtttcagtttcttgacatcctcaccaacaccactacttttcttttttgtacagtagccaccctagtgagtgtgaggtggcatctccttgtgagtttgatttgcatcctaatgatgagcgatgttgagtgtcttttcacatgcttattggccttttgtatatcctctctggagaaatgcccagataaatatttttaagagtaaaattagctaagttaggaaaaatatcacatgatacctagtaagaatggtttcttggacatgagttctctctccactattctctgtggagtcctgctcttctcccagttcctttctagttaggcaagctaagctggaagctttttttggaatagcgtcctgaccagctggtgcccccttctctcccaggggatcagacgttctgagggccgcagatgggcgtccagccctggcccgcctttgagagccgggttcttgagatgctgccatggctggctccttctcacctgccgccatcactccctgagcgctgaggtgctgggccctttctcaggcagactttattcctagaggatttgttcatcgaaatgtttgttgattgtgattgcatgtggttcagccttggggcatcagttgtggttggggtgagtttttcaagaagagaagtccctttgatcttcagttcttgggggtcaacttcaacaaacagagtaggagtcacaagctttttctgcaaagaaactgatagtaaatattttagacttctgtggaccataaagttcctgttgcacctgctcaattctgctgttgcagcaggaaagtagctgcagacaatacataaatgaattgtcgtacctgtgttgcaatactttatttacaaaatcaggcagcacaccgtattttggcccatggaccacagtgtgatgacctctgatgtagcgtttcacttttcaccatctccagtttgactaacctctgtgattttaacataggcagatatccaagtagagcagaaccggcaacacttctatgaactgtctctcgagtatgtgtgtaagctgcaggaaatccaagaaagaaagaagtttgagtttgtggaacctgtgagtattgccaagttgtttgctggtggatttttgcaatgtaagataagtatttattttcctagatctgatttatggtttatagttactagaggccatagtgcataaacatgaaagagacatattaaaaagggcagacacagatagccatgaagtcaaggaattgcctctaaatcagtggttctcagctgtatttgcactgataatacacgtaatattcccattgctacatgatctcaaggaaggcaaccatgtgcaatttctgccaccttagcctatagctctatcttttaaaaatttctctgaaataatttatactagaatgagtgaacatgggttgtttataccggttcaaactttggtactttaaacaatcgtttgtaacatgacttcaaacacaattcacaatgcttatggcaatctaagtttagaagcaggatatggaacatttgagacaattttgtgagttactctaacatttctttttacttatattagaaacacatgatttttgtttgtgattatatagatgttttctagtagcttcagttgtttatatatgaagatgtatgcacatgaatgtatatatcataatgtaaaggatatttcatgtggatttcagcaaaaaaacactggatctcattctcaggattcattttaattttaatatcgacttattgaatggtttctttttcttaaacagctttattaagataacattcacacagtatacaatttactcattgtgagtatggtttatagaaacaagaataaccaagtaatgattaaaaatgagcatttgtggagctatggtttagttggagcgatagtcattaacctaaaccattagagaaaaactcaacctcctcaaagctttctttttaatgtgaaataataataatggcctgcttttattgggcatttataatgctcagtctctgttcaagccattgttctaagtgttgtaccgaactcattattccacactataactcaatgaggagataaggaaatagaagtagagaaaggctgagtaatttgcctaaggtcccataacaggtcatggctgacgttgggaatggagcctgctgggtgtcagagccccagattcctaaccacccacggtgtggcatttggaagaaaatgaatctcaagatttccttaactctctccccagatcacttctttttacttctagatttattgacttacatgtggagcagaggcaacagccctctaattcagagacaggttgggagttggtaggaaagtaaaggtttaattacgggtttgaggctgcccctggcaagtcatggaatatctttgtcaacaaaacacaggggttgcagtctgctggatgtggctggggagagcctggagctctttgattctgtgattttactttcttaaagattgtgtcaacctatagtgataagatttcaattacaaatattgggattctcctgactaaagaggacaaatggatgacttaataattcaatttttcctgcagaacatgccatataagctgtctaatggctgtgatatttaagggaaaaaaacatcattttctataaagaccaattaatagataatatgtacttgtgtttacttgaatattagtgacttccctttaatcagtttatttcagtggaataacagtgagatggcggggggaacacttggttgtttatatgattctttttttctcctgagtttttttgtgctaatatctcttttcttcctgtgtcttagatgctgtcattttttcaggggatgtttaccttctatcatcagggccatgaacttgccaaagacttcaatcactacaaaatggaactacagatcaacattcagaatgtaaggaagtgaaagctttctttataaaaagatgtttgaaaagtatttttcatttgtgtgttgtatgaaaagccttaattaaatgaagacaatgctgatctgtttgtactgagaaactgagggtatgctgccacctgctggtcaactcttggtgtgaccaactgctctacagttggttgaggcttgggaaattctgccacctggcggcttttcctgcagtttctgggtcaattctaaggataagctttgttatgttaactctaaatcagctatgtctgctacagacaaaagagcactccactttaaggcattgaatttataatgcactacttaactgggcatcttgatttttgttcccagataggcttatcatttgagtagaatttcttccctacattttatgcatatttactaatgcattggtgtttacagttgctattggtcttgaatattttcctttggaaaatgtgtgctttctgccaggtctcggataaagagatttaggagaatgttattaagcagtacactatatgtcattttgatcaggtggtatatgtttttcctctcagtgctagttgatcctggaagcgtcctcactgacaagctggtcagggtatgttgagtgtaatttgaggtctcattaggaatgtagtgagatagctttgtgacagactcacagcacatagtgaaagacacacaggtagatggatgggaagctgtggttgttgcctgctcttcatttctttcacaattagaagttgagagtgggccgggcacagtggttcatgcctgtaatcccagcactttgggaggcctaggcgggcagatcgcgaggtcaagagattgagaccatgctggccaacatggtgaaaccctgtctccactaaaaatacaaacattagctgggtgtggtggagtgcgcctgtaatcccagttactcgggaggctgaggcaggagaattgcttgaatccgggaggtggaggttgcagtgatccgagaccgtgccactgcactccagcctgggcgacagagtgagactctgtctcaaaaaaaaaaaaaaaaaaaaagttgagagtgaataccttttgtgtagattttgtttctaacttttttttttttatgtacagttccttatactaaggagtgtagctgataaaaccttatttttataatttatgtgtcaacttgtatttgaggattgtttggacattcagctgggctaatgatagagttctggagtagattctttttctgctgctgtggtctcacaatttgtgaaaacagttataaaatatgtggtatgactataatgtgacaaaacttaaaaatccaaaatgggtatgtgtggattcattctagtcaccccaaaattgtccctgcaggtagtagaatattgagtctaatgttgttgagttttttttgttttttttttttgagacagggtgtcactctgtcgctgaggctgaagtgcagtggcacaaccactgctcactgcagcctcaacctcctaggctcaagtactcctcctgcctcagcctcctgagtagctgggactgcaggtgcatgccagcacacccagctaattttttttctttttggtagagatggcatctcattgtgttgcccaggctgctcaaacttcagggttcaagtgatcctccttcctcagcctcccaagatcctggcattacgggggtgagccaccatgcctggctgatgttgagattattcagaatatttttgcaggcagcagaaaacagttatgtaaaaagaacagtagatagttcacgtaagtggtccccaacctttttggcaccggggactggttttaaggaagacaattctatagatgcagtgggggtgggagaaggtaggggatggtttcgtgatgaaacttttccacctcaggtcatcaggcattagattctcataaggactgcacaatctagatccacgtgcgcagttcacaatacggttcatgctcctatgagaatctgatgccaccgcggatctgacagaaggtggactcaggctcacctgccgctcacctcctgccatgtgacccggttcctaacaggccatggaccggtacctgtcggcagcctgggggttggggacccctgcttgagattataacttatgttttcccctctgcttactggctatataatctgtggaaattcaccttgtctgtctggacctcatctgttaagtgcagggctggccagaatgagaaccttcaggcaggactgtatatacaacttctagaatcaaggtaaaatgaagaagatagtgccccttatttagagataattaagagtttcagatcagaggcatttgatcattaaagcaagcagaagctcttctgagcgcagggccctgtggactgcataggtgaatgtcctgaagccagctctctgcctcagactctggggtgagctgtggggaaacatcagtctcttgggatgttgagtgaaactccttgcacggctcgtttatttgtggaagtgtgtttataacacacctgttgggggagcgtctgtttaccttatataaaccaaaaaactttcagaggcattaaatatttagatgggaatgagcaatattctgtctggaaatcttatgagcaaaccttgaagctaagctatcatttgaaatgtttcacaaaatgacctggttggaatccttaatatattgagaacttacacaattgacaacagtgatcattttctgtagagaaatggggaaatgacagtttattgaaaaaaaaaaagccttttttgtattctctgtcacttaaggatgtggtcatcagtaaatctccctacattctcaactttttctctaaatattcctctcttgattttatttggctgtttcttaataaacactcttacaactcagagtttctctctgcgtcaccttcagtattgagaacacctgatctaggtggcgtctttgttcttcaaaattttagcttttagctaattttttatcagaaacacaagcacttatgaaaagcaggtcactcattctgtatcatctgctatacctcagtgatgttgtaatttgctcatttcttggccattcatctcattccttgatgtcagttttttattataataaagagaaaatgctgggtatataaaacaacatattgttgaaaaaagtcccagtttttttttgtctgtgtgtgtgtgtgtgtgtgtgtgtgtgtgtttcatttatttgtttgtttgagagggagtctcgccctgtcacccaggctggagtgcagcggcccaatcaatctcggctcactgcaagctccgcctcccgggttcatgccatcctcctgcctgtagtcccagttcatgccatcctcctgcctgtagtcccacctgccaccatgcccagctaatttttttgtattttttgatagagacggcgattcaccgtgttagtcaggatggtcttgatctcctgacctcgtgatctgcctgccttggcctcccaaagtgttgggattacaggcgtgagccaccgcgcccggccgcatatatgtattttaggaaacataatcaaatgttaactgcctctgcattataacatcataaatattttggtcatcttttaagtatttaattttagtaaaaaagcaaaactttataatcagaaaaaggtaaaaggtatttaaaagcgaaaacctatttttccccatctgataatacctattgtattgtaaaagtggctagacttttttttttttttgagaaattgagtcttcattttctataatctagagtaataaatggaaatcaagaaagcagcaagatggcttttaggaaatgggttttccagaagaaatttggaaattgcctcaaatttaaagaatattttaagaaactaattttgcacttttgtgatttctgtctcccgaagaatgtggggaagaagagactagaatagaattcttcctggaaggaaatacagtgtgcaaaattttaggatttgtaaagagtccctagaagataacaagaatgggtaggaagtatttaagaatatgggcaaaatatttttgtcgcaatgttctaaggaaagtagaataccaaaactacagactgtgtgtgtgtgtgtgtgtgtgtgtgtgtgtgtgtgtgtgtgtgtttgagatggagtcttgctctgttgcccaggctggagtgctgtggcccagtctcggctcactgtaagctccgcctcctgggttcacgccattctcctgcctcagcctcccgagtagctgggactacaggtgcccgccaccgtgcccggctaatttttgtatttttagtagagacggggtttcaccgtgttagccaggatggtctcgatctcctgatctcgtgatccgcccacctcggcctcccaaagtgctgggattataggtgtgagccaccacgtccggccgtgtgtgtgtttttaaaagagattagaaatggccacatcaaaatataacagcagttacttgaggggtgggcttgtggttagctttagtcttacttatcccttttgtttttgccccccaagtaggactattcgtgtccgtctctctattttacaatgatatggtttagtttctataatcagaaaaaagttttttaaagatgttttctctttcaatcagatttaaaatactaaaataataaggcttaatttaaagctagtttatttggaaatgtttaattactaaaggatgtaaagaaaacaaggcagcagtgatcttttattggaaagatagcattagacagtgtcctaccgtatagattattgtgaggattaaagaaccatgtaaatgctcaaatgttacctattgtaacgtttggggtctaacattattgtaattagaagatgccttcatatgtacttggaacttataattggaaattgcaaggttttagccattctattgattttatgcaaagttttcaattcataatttacctaaaaatggtacatttaaaaaatagtggctggggatggtggctcacgcctataatcccagcactttgggacattgaggcgggaggatcacttgagccccagagttcaggaccagcctgggcaatgtagtgagaccctgtctccacaaaaaatagagaaaaattagctggaggtggtggcacatgtgagtagtccctgtactcgggaggctgaggtgggaggatcatttgagcctgggaggtcgaggctgcagtgaactgggattgtgtcactttactccagcctgaccaacagagtgagactcggtcaaaaaaaaaaaaaaaaaaaaagccttccattcccagtgcagaaaataaacctctgaggaagttgggtggtgagggagagggggacctcatggaggcgtctgcggcagggatggtggagtggtgatgagacagaggtggctgctggggcatttgggagattgcttatgctgagcagagatgttaagtgagcacgtaagcagacatgttgagaatgagaaccaggcttcttactgtctgggaaaaaattcacaaatttggaaggagagaggctggaaagaaacctgaagaactggagtagaattagatttcttggtaggaagtcatgggttttcaaatatataggtagataaagaagtagtgattgtgtgtttatataaacacgtgtgctctgtgtatacagttgacccttgaactatgttggggttagcacccctgcgctattggatgtctgcgtgtaacttttgacttcccccaaatttgactactaatcgcctactgttgatcagaagcctcacccataacagaaatagctgattaccacacattttgtgtgttctatgtatgatatactgtgttcttacaatgaagtaagctagagaaaagaaaatgttattacaaaaatcatcaggaagagaaaatatactttaagtggaagtggatcatcataaaggccttcatgtgtgtcttcataatgagtaggctgaggaggaagagttgctgtcacaggagttgtagatggggaggaaaatccatgtataagtagatccacaaagttcaagcctgtgttaaggctcagctgtatgtacatctgcttcctaaggctgtctgctgagaagacttagaagtgagcacactgtgcccagatcttgtcgcaggagttgtagatggggaggaaaatccatgtgtaagtagatccacaaagttcaagcctgtgttaaggctgaactgtatgtacatctatttcctaaggctgtctgctgagaagtccttagctgtgagcacactgtgcccagatcttggtttccaaatattaaataccctccactaaaaagaacaagagctcctttccaggactggcgcagggaaagtataagatgagcctagggtaccttattggaccagaaggtaaggaactggttgaagaatcaaggggaccagtcaaaagacagaagccagttcgaagggacctcctgctgctcaaatctagggcaatttgagcatgaacataaataatagcattattggcttaaatagaagtgtgtgtacatgttcacacctgtgatagcatccatacatgtatggcatgcacatatatgcatatgtgtatatatattatacacacatggggggaaatgagggttgatgagggttggaaggaatctcagcaaaatgaccaaggaggggaataaagtcagggtgaaattattacaaagatggggataagggtgggggatggtggctcatgcttataatcccaacagtgtgggaggctgaagcgggtagattgcttgagcccaggagttcgagaccagcctgggccccataatgagacccctgtctctacaaaaaaacaaaaaacaaaacacacacacacacacacacacacacacacacacacacacacacacacacacacacacacacacacactcttagcctggtgtggtggtgtgcgcctgtagtcccagttcctctggaggctgaggtgagaggatgacttgagttcaggaggttgaggctgtgatgaggtattatcatgccactgtactccagcctgggagacagagtgagaccctgtctttaaaaaaaaaaaaggggggggataagaaaacctggagaaatggaaggcgagagggaacctagccgtcaacaactgagttctactttctttgcgggcttacactttcttacaggacataagctgatatttctcgcagctcttagtttgtgtttaaaaaaaaaaaacaaacctctgcagacaggttttcccttttacaatctacatttatcagactctccatccctttacaaaaaagatgtgccattctaacattttgccacgcttaggacccttggcagccccttttattgtagggaggaaagaggagaaatttcaataataattttctgtctcagttcctccacagtttcacatcagcagttttttggtattaatacaattatttttgagcctggatgaaagaagtgtccaggaacacggtggtgctgactcgtcacaattgccttgctaattctgtcacttcaccttgtatatatgttttcagtgtagccgtttgacagatattggcacaccaagtgtcctgggtttcagaaatgtgatttgtctcttcagatatcaaagacattatttgtgtaggtgagattttttttcccccttctgtcttcagggaagaaatgtcattttcaagtgcaattgccatgacctggaaaaactgacacttgtatttattagtttgcaaagaagaattaaactttttcagattctgagtatttacagactgctaatgtaacagtaacaaaacagattgattgagtcagattggttgttgcaaaggaaattcttctcaggtagctatattaaaacctaacttatgttttaaacctaaaatttggtaatagtgtgagacctgaaggcaggaatttttatgttgaatagtaaaattattaatggtgttagaaagcctccaaagtaacctgtagtaaccttggcttatactcctctggtagctattttactgctatttttttttctttgcacatgaatctcaggaggcacactggaaagaatgggggtattttgagaaatttataaaaaagttatttagagttaaaaaatgtaattacatttatgcagagactttaaaatgttcatgagaaaactcatatgagaacttaacatttatgtgtgttttttaatccatttcagacacggaatcgatttgaaggaacaaggtcagaagtggaagagctcatgaacaaaatcagacagaatcccaaggaccacaaacgagcaagtcagtttacagccgaaggctacctgtatgtccaggaaaaaagtaagaggccctccagcagtggctgcgtggctgcttaaaaatgcaaattattgaaaactctgctattcttgccattactgtgacattttgggcaattattcctacctctttctctccctgctcctatcacctaatgggtgtatatttcatgtttaggagaaagacattccagccctggagagagggggtactgtgaggttaggagtggctgtgagcaccctgttcttcagacaccccactagcttctgttttacactgtgtgcaccccaggaacatgcttgtaagagagtcagaatttggtgtaaggctgaaaatgagccagagttacgagggtatgatgttttttctccttccccctcacctctaccctcatcaccaatgcacacaggcacacacattcattcatacacacgtatacgtcctctccctcccataaccctgcctctctgtcatcttaaggtcaagagggacatattagtatttttcttcttccttcataccatttttgttcccaccagtctgagatagctggttcttactaaaatcatcaggaagattgcagatggtgataaaagatattcctacgtggcatcctaacttgtaggctttttagtctttgttgctgtcttagcaaatatgcagtgcatagattgttctcattttgaaaattaaaagacctgtatttctttcagactttgaacatttggtcttattttaacagctaagttcttaacgtttactacgtcaactgtacaacccaattgctagttagcagaagggatgagaatgtgaaatgggtctctttactatttccctccctctccacccttaactgtgattagggtgttttacagttttcacttcatttaagtgtggctgatttacaggactttcaatccgacctaaaaatttagtggtagacatgactcagggaacggttacagggtatctgtgctttgaatagaagttaatgttctatgcaggcagcaggatggttgtgccttttccatttgcccttatttaatctggaatctcgcagccttcaccttttgtgagcagttgtatgatatggcagaagtctccatttttctcatacattatcttcttaatctcagtttttaaaattgaatttgaaagaaataaattaaaactcaagatagggctgggcgcggtggctcacacttgtaatcccagcactctgggaggccgaggtgggcagatcacgaggtcaggagatcgagaccatcctggctaatacagtgaaaccctgtctctactaaaaaatacaaaaaatcagcagggcgtagtggcgggcacctgtagtcccagctactcaggaggctgaggcaggagaatggcgtgaacctggaaggcggagcttgcagtgagccaagatcgcgccactgcactccagcctgggtgacaaagcaagactctgtctcaaaaaaaggaaaaaaacaaaacaaaacaaaaaaccacctcgatagtcttgagaatgttagaattatttgtattatatgcccaagtgaaaatcacaggaaactttaatttttagattcatcactgttgcctttgagagaaattggactgaaacaacataacagtagtggtaaaattctttcctcatttactgtatacccagcactgtgctaaattcgtatacaacttgtctcatttatccataaaacagccctatgaagtataaggtactattactgttgcccatttataaatgaaaatggaggcactgagaggtaaataatgttccctaggtcatacaactactaaatgctggagttgtcattctgaacctggagtctgtgttggtaatgtctcccgtaaattgcttggcgcttgaacaggcgtgaaagagcatcattagtgtgtatgcccagagctggttgaataggccctgttggttgtcagaagggaatggtggcttaagtagtggaaagaccttgatatttggggccagagattctgatttaaggtttggctttgtcattttccaggcatttgggctaagcttaaattttttttggattaaatagacagtatcatcctctctgggcagttttttttttcttagagttaaataaaatatctgtgcaatatttttttgtcaaccatagaacacagtacaaatgctggttctttaaaacacaaagcaatgtttcccaaattcaggtctttggactgatgatggtctgagataaaattgatagtggtctggtaacccttttcatctattacccctgtcccaaataatgtaattagcttttcctaaagctagctaaaagcattccttttacatgagttatttttcccctcctgggcttttttgatttttaggtgtagaaactttgtttgtttgtacatgaaattactgtgataacagatgttaattgcttttttaaaagtgtcttgactcagtaaagtaagaaattgtcaacttctgctgggcctaacctttaatttgttatggttggacttttattggcatgtgaagttccagatgctagaggtccctctgacatacagcattgtcctgtgagccctgatggtggtactgctgacttagtaagagtggaaaaggggttcagagagtgttctggggcatacttggacagtcactcctattgagtcttagatttcttattcttcatactttttttttttttttgctgagattacaggcatgagccacgaggcccagccattctcttggttcttaagatttttttagaccttactgattacagtaatgttaagccagacaataccaatgttattttattttattttttgacagtgttgctctgtcacccaggctggagggcagtggcacgatctcatctcactgcaacttccgcctcctgggttcaagccattcttctgccgcaccctccccagtagctgggattacaggcacgcaccaccacgcccagctaatttttttttttttggagacagagcctctgtcacccaggctggagtgcagtggcgcgatctcagctcactgcaacctctgcctcctgggttcagcctattcacctgcctcagcctcccgagtagctgggactacaggcgcgtgccaccacgcctggctaaattttttgtattttagtagagacagggtttcacaacgttggccaggatggtctccatctcctgacttcgtgatccacccgccttggcctcccaaagtgctaggattacaggcgtgagccactgcgcctggcccatacttcatttttaaaggctagctttcaatcatcagtaagagcagctgcttactaggatgctgttcatggacttaaagcactaggtggatttttagactagatgcttcttagcactatgattctataattctatcattttgagaggccagaattaaatcccaaaccatctcatatatgggatggaacttttgaaacccttgtgagctcttaatacctagaaacaaacaaaaaatagagcttacaattaagagattttcagataggacataactgttgatttttctagcaaactatttaaacagtatgtctttaaatcacttctgtcttgctaaatcttagaggtttgtttcaaagtatctcttattttccttcttcctcttttttttttttttttttttgagtcggagtctcgctctgttgcccaggctggagcgcagtggcgcgatctcggctcactgcaagctctgcctcttgggttcacaccattctcctgcctcagcctcccgagtagctaagactataggcgcctgccactatgcctggctaattttttttagtagagatggagtttcaccgtgttagccaggatggtctcgatttcctgaccttgtgatccacccgcctcgacctcccaaagtgctgggattacaggcgtgagccaccgtgcccggcctcccctcttcttcttagaactagcagtattgctgatttgtttcattgattcagctgtattcgttgctgcgttttagacgtttcctctttagtaatgtgtttatagctctgcaaatctgcttatttatgagggaaaatataaagggctgtttttttgttgaagggcctgctccgtttggttccagttgggtcaaacactattgcatgtatcgaaaagcagcaaagaagttcaacatgatcccatttgagcacagatctggagggaaacttgtaagtatttgattcaacatagaatagattataatctgtcagaggtagtgtttgagggtgtcattttaatggtttatattttaatggtttatattcatggatggtaaataaattgttagtattaaaatctttgttttgtttttgagtgaaatgggccagaagacagaacaatatatatgttttctgaattacatgcatgggttttaaaccactagatttttttttttttaagttctgggatacatgtgcacaacgtgcaggtttgttacataggtatgcatgtgtcatggtgatttgctgcacccatcaacccatcatctacattagatatttctcctaatgctatccctcccctagcccccagccccctcacagaccccagtgtgtgatgttcccctccctgtgtccatgtgttctcattgtcagctcccacttaagagtgagaatatgtggttttaaccactagatattttttaggtgaacaatagaatcctttttatgccactgtttggaagataaaggtaacactgacagcaagctttcatgactcagtggttcctcagcatttatacaatggaactgacttgctgttcatagcctgaaaacaaagaagagtgatctacgataaattttactgttgttctgttcatcttacaaagttctcacataggtattcaccatttagttaactgttccccctgaaactaaaacagcaaagcatgatagtaagaaaagagcaagaagacctcacagagttggctgtgtaggaaaggtgatctttatatgtattttaaatggaatctgcagcttattacaataattaatggcctagagacaaagcttcccaccaatgttgaacataattgataacacattttaagaaagcagcttaattcattgcttactgggtgaatgggtatggttttgcttaggtgaataaaaaaagaaaaacctatgttcacttctatttacttgtactatgcctttccctgaaaaatatttaaagcagcttttaataaaaacacatttatataataatgaaacagacatggaaaattagtcatggtgaggagaaggaagtgaggagatggctcttgaagcatcaggtttgagactgagtttcctgtcagagccagttcaagtcctaagatatttctgcttagtgatatctttctgttttagcctccaaataataatgataaatatgttatggaatataactgtgagattttgaatatttgtgtatcttaatgtttgttacttagagatcttcacgttctggaaaatgttaaaatgttcaataagtgtgtactcacactttatatagttgttcttttactgagcacttgtatttctgcattgcaaattaagtaaagataaattcagggtgattcacatagggaagagagaaattgcatagattaaatggttctagctttagattatgaaaatatttaatctagggttatcggtgtacttttaggctgacgtgtatggaattgcaatttttataggccaaaaatagtcacatattttttgtgacatgtggtaagaaataaatttttacactaaaaaaagagtacaataagagactaacagtattccagtatcttaaaactgtactgttaatctacctttgaaaattaacatttggccagggacactggctcacgcctgtaatcccagcactttgggaggccgaggtgggcagatcacttgaggtcaggagttcgagactggcctggccaacatggtgaaatcctgtctctactaaaaatacaaaaattagccagtcatggtgatgcacacctgtaatcccagctatttgggtggctgagtcacagagttgcttgaacccaggattcggagtttgcagtgagctgagattgcaccactgcactccagcctgggcaacagagcaagactgtcaaaaaaaaaaaaaagtaacattggtattgtctggcataacattaccatcatcagtaaggtctagaaaatcttaagaatcaagagaatggctgggcgcggtggctcacgcctgtaatcccagcactttgggaggctgaggcgggtggatcatctgaggtcaggagattgacaccagcctggccaacatggtgaaaccctgtttctactgaaaatacaaaaatcatccaggtgtggtggtgcatgcctgtaatcccagctactctggaggctgaggcaggagaatcacttgaacctgggagatggaggttgcagtgagccaagatcctgccactgcactccagcctgggtgaaagagcgaggctcccttctcaaaagaatcaggagaatgacaaaaatattaatattttagattctaaatagcatttaaataagccagtttgaaagaggatagggtaaagagaaggacttaagatcttgaaccttgctcccctgctctccagtatagaatggctgagtgtgtatatacttatcctgtaggttttgagaatgttcaaaatgattatttgcagggggacggagaggtgttctttttgaaagaatgtaccaagaggcatactgactccattgacagaaggttttgttttgacatagaagctgctgatcggtaagttattggaattattggacatggtgaaagagtcgttttaaaaaaatgatttaaaaaaatagaggttagttgcaactgtgatttctgtggcctgggagaatgttatcttgctatatttccaggctgtgtgttcattataagctgtttagtcttgatcaccgggtttagctatggggtgatagtttcatcttgatttagttaggagtcattctaaccagggttgtcacttaaaaaataaccttggaggccaggtgcagtggctcacacctgtaatcccagcactttgggaggccgaggtgggcagattatgaggtcaggagttcaagaccatccaggccaaaatggtgaaactctgtctctactaaaaagacaaaaaaattagccaggcgtggtggcatacacctgtagtcccagctacatgggaggctgaggcaggagaaccatttgaacccaggaggcggaggctgcagtgagccaagatggtgccactgcactccagcctgggcgacagagtgagactccgtttcaaaaaaaaaaaaaattgccttggagcttttcattgttgatccaagcctaatttgtagcatgaagagaacaatggcgagaggaactgggtgacaaagctaaaaaggggtgataggtagctagctactaatacagaacaacattcatttgtgtgtgggggggttttcagtgtctacatcccgtacgtgatggagggtcttaggcaaactccttctgtttattcaaaggtgaattcttttttttccttattgcatgacttccagttatttagttgtaaaagaatctttgccagagaggaagaagtagaagagaaaattttgttcatcagtattactacttgtctggcattaatttctatgtcctccagtagcattaaggaaaatcctagtgttcatagaatatttgctttttaatggctgacagtacagtgattccttgccagccctggttttggcagtgatagtttttaggtaaggctgttctatgtttgtataataaaagcttatgagatttgttaaagcaaaagttcaggtcagaacccaggaatacaaaagtaattaatgctgcttcctctcttagatgatatagttgagtctctgggagtagtgcagagaggaaggattagtggttcactttgtaataaatgaattgaagaccatttattgtacataaaaacaggcccttaagcaccatgataagtttggcactactgtgaaaaggacaagtggttaaataagcgttttgccaagataggaaaaatatgaaagagaatgtcagtgaaaaagaggttgggtcttgctatgttgcccaagctggtctcaaaactcctggactcaagcaatcctcccaccttggcctcccaaagtcataggactacaggtgtgagccaccatgcctggcctaaatttcaagccagtaagaactcttccaaactttaagaagggaattagtcagtgtaacacaagtcgagcatacatctgtgcgcacacacccatgggtggcattggattcctttctgagtgccactgttctaaatgcttctgtgttttatctcagctaattccttgccatagctctctcaggtagttgttactgtttccattttatgatgagaaactgaggcacagagcatttgagcaatttccccaaggtcacgtagctagtgggtagttgaagagctgagatttgagcccctgcattctccgcctagagccccacatcttacctttttcttttttctttctttttttttgagacgagtctcactttttttgcccaggctggagtgcagtggtgtaatctcggctcactgcaacctctgcctcccgggctcaagtgattcttctgcctcagcctcctgagtagctgggattatgggggcacactaccagacccggctaatttttgtattttcagtacagacagggttttgctatgttggccaggctggtcttgaactcctgacctcaagggatccacctgccttggcctcccaaagtgctgggattacaggcaagagccactgtgcctagcttgagccctacctcttaaccactgtgccataagtctctgcagattaccatataatcagaatgttttctaaataattgacaaagatgagctagcagtctactagagaatatgttaagtgaggtgaatctgattagttgtgaaagcagggtacttctataatgcaatttaatcattttaatcatccagagtctctggttttctctgagaccttgatcatccccaattttcttttctttttttgtcagccatgatcctagctatgattggaaccactctccacccctcaaagacattgatgagggattcctatggaggtgcttacacatacgaaggataatacctgtagggagactcttggaacaggggaggactttaggtcagggatctattctagtggttttcaagtactttatagggagactctcttttcaaataaaatttcatgttaatgtgtatataaagcaaaaaaagtgggttcccttattaaagaggcataggggcctggattcctccccaccttttagcttccgtcttttttcttgcaaaagtctctaatttacttccattgaggctcacagctcctttctgggaactcctggcagggggacctaatctagtttaggtggctaaataaaggcacacagaggatctgacatctaaattcataaactaaagggttatctggagtcagctgggattgagagtcatgtgccaggtagagtgagtgtcacatgtggaggcctggagacaggagagagcatgatgtatttgagacacctagcgtcactagtgcaagagccagagagagtgggagaagaggcttgagatggggcaacggcctgaacttgaagtttttgaacttaatccattaaatagttttaagcagggcagtgagtgacaattatatttgtatttctcaaagctcattctggcagagtaagaaagatttggaggtagcaagaggggacaagaggaagtagtttaaggacagggtgagagggccaggattggtgtggtggcagtgggggtggagccaagtggggtagatttctggggataaactggatgttgcagtagagggtgaaggagtggggaaggtttctggcttgagtagctagatggtaccattcactaaggtgggaaacaaagtgggggcataaggatgggggaagacagtaaaattagtttgggtcattgtattagttcattttcatactgctatgaagaaatacccaagactgggtaatttataaagaaaaagaggtttaatggactcacagttccatatggttggggaggcctcataatcatggcagaaggtgaaagaggagcaaaggcacatcttacatggcagcaggcaagagaacgtgtgcagggaactgccctttataaaaactatcagatcttgtgagacttattcactgtcatgagaatagcatgggaaaaacccattcccatgattcagttacctcccaccaggtccctcccacaacatatggggattatgggagctacaattcaagttgagacttgggtggggacacagccaaaccatatcagtcatgttgagttagattgctgtgggtcattatgaagagaaacctgggaagaaattgggtacagagcttggcggctatggcagcatttgatttgttattcacgtttgacctcctgaaactctctatccttttacttccatgacagttaaccattctggttctccctcagatctcttggtcctctccagttcagctgttgctcctttaaatgttgccatttcctatagttgtttttctgtatccatccattctcatggtttcacacttgaaagtatatctcttgtaatatgtagtttccttacccttttctgtgttttgaactgcttctagaatgtttagctccctaatcctaaaatccgagatctataatgcttccaaatgcaaaaattttttagcactggcataatgccacaagtggagaattccatacctgacctcatgtgatgggttgtagtcagaacttcatttcatgcacaaaattattaaaaatgtacaaagttacctacaggctacaggtataaggggtatatgaaacgtacatgaatttcttgttgagatttggtttccattcccaagatacctcatttcgtatgtgcaaatattctaaaatccaaaaaaaattgaaatccagaacccttctcattgcaagcattttggataaaggatactcaaccggtgcattgccaattctgctctttttacaagtcttggtaatttcagtatggcttcagatgatgctttcagcacttggcatcttgacttgttaagttcctctccttcagtgaccttgttctttaccgtacctcagccattctctccggtgttcattccttagactttgtcattgcaaggaactgcagtcctccgcaatcctgattgcaagactttctctttctaccaccttctttcctaataagtacccttagattccccagttaagccctacagtctgttgttcgtcgtgcactcactttcttccttaactagttgaaatttcatagtcactcatcacagtccctttttaatacccttcactccactgcttctttccttctttattttgcttgtttgcacaatcccaacttaagattcagttctgccttctctctttctagagaagcaatttctactgtattcatgggatcacttcaaatacatgaccactgtccaacaataggcggccattcatggtagccactgatcatactgtgttttctttttctttttcttttctttgagatagagtctcgctctgtcacccaggctggagggcagtggcaccatctctgctcaccgcaacctccgcctcctgggttcaagcaattcttatgccttagcctcctgagtagctgggactacaagtgtgtgccactatacctgactaatttttgtatttttagtagacggagtttcagtttcaccttgaactcctgaactcaagagatccacctgcctcggcctcccaaagtgctgggattacaggcgcgagtcaccctgcccggcccatgctatgtttccttagttgctgtatactcccagttgaatattttatattttcctctctctcttaagctctgacactgccttcctttcctgatgactttgtgtcctattttgttgtgaaaatagaagctgtaacaagagctctttcccgctctggacacccacctccaccctcagtgcccagacagcctgcctttcctccctgcctgtgggagctgcctgtgttcctgatggaggccaactcctctgttcaggtgtttccatttcctcttcccatcttctctccactgctccaggatattactcaagcaactctactttttctttcttgttaacattagttttggctcccggcagcaagtgaaatgctcttatttcattcatcttaaaaaaaacaaaagccactacagccaccatcaccaatgaaaccacccttccctttcatttactgcccattttttaactcctataaacataacaattcttcaaaaagctattatatttatggtctcacatttctttcctggccaggtgcggtggctcatgcctgtaatcccagcactttgggaagccgaggtgggtggatcacctgaggtcaggagtgcaagagcagcctgaccgatatggttaaaccccatctctactaaaaatacaaaaattagccgggtgtggtggcgggcgcttgtagtcccagctactcaggaggctgagacaggagaattttttgaacctgggaggcggaggttgcagtgagctgagatggcaccaccgcactccagcctgggcgacagagcgagactccatctcaaaaaaaaaaaaaattttttttttcctatttcttccctcttctcttttgagctgtctactgaggcctttgccctttctctccactgcagtttttgttgaagccatcagtggtctccctgttgctgtgcctggtggtcgattcccagtgctcatggtctttccctcgcagcatccctgacattgcccatcactctctcctccatcatacacttgcttcaaggacatcacactccctctcgcatcactggcttcttcactttttgtacttctttgccagttcttcatttcccagacccctggatgttggagttcagcccttagatgttttcgctcttcactcacacttttttatgaccttgtccagtcttacgactttatgtgccatccgtatgttgataacttgcaaatttattatctctacctggatcttgtccctgacctccagcttcttatatccagctgcctactcagtattgcttctggggtgtctaaaaggcatttcaaacagtgtcgatgtggtgaatggtgattgttttttgaaagttttccaataagtcttgggagtgggagtgggggtagttacattcctctaacatgttatataggtaaatgaattcattcctaccatataaatactaatatgtaaatctttattttttcttaaaagtcatacatgcttattttaagtccaaaattttctaaagctccttggttaacttggaaaataatttttttgttgtgttcatatcctttagtctaaaagatgaagctgctttttaaaaacaattacagaccccccgccctttaatggtttatttcctcatttctaaacagagaaacatctattctggtttgctgttaccagtagatactgtttggggttccttaatttcctgccattttccaccgtctgtgtcttacagttagtctcatgtggagcaaaatctgctggcagaaggtgaatgtactttgagatctgtgattttggggcttcgaaagcattatttagtgaaaagtgtgaatgagataggctcttctcttgtctactctcctgattcctaggtagaatcaggaatcagggaattataagaaatttgttccttgtctattagattatgaattccatgagggtaggaacactgtcttacttagtgttacttggtatcacaataccacatgtaatgctttatacatggtggacatttaacagatttgtactggattaaacgaaattgaattgttgctcaaaagtgactgaactgtgattagattcaatcaagcaactgtcagtcaactatccttttcttctgcaccacaccgctatactgtgagctctagtgtcttcattctgcttcaagaaaaataaacctaacttgttgtggagtttgtgggtattataaatggatttctgatgcagtttgtacaaggttcgtattgggtaccttctttttttttgagatggagttttgctcctgtcacccagtgtgcagtgcaatggcacgatctcggttcactgcaacctctgcctcccaggtttgagtgattcttctgcctcagcctcccaggtagctgggattacaggcatacaccgccacgcccggctaatttttgtatttttgttagagatggggtttcaccatattggccaggctggtcttgaactcctgacctcaggtgatctgcctgcctctgcctcccaaagtgctgggattacaggcatgaaccaccacacctggccctcatattggataccttcttatagcaatttctcagttgattgtatatgtctaatgtaaacatactttgtcttctttacaagtatctgtttttgctattttttttttatttcctgtgttgggagggcagctgggtagcattttgaagtagatgatatttaataaactgcacagtggaggctgggcttgcatttgatctgtgtagatataaatcaagagcttttacttatttgtggcgttattttagatcagatttggttgcatgtaacagaaaaagtcaaaacaaaatggcttaaacggggttaaagtttatttttttctcttgtttgggaagcccagaggttgccagatcacagctgatataatcctgctctctcgagcatagtttacttttatcagtcacctgaggcacgagacagcatatagcactgttccatttatcacatagcactgtctgtggttgtagggacattttccagtggttgcatagactacttttgctcacagaccattggctggaatggagttatgtggttatacctagttgcaagggaggcttctaaatcctaaggttgggaaattgctgtcttttgttttcagaggtccatgagttgttttagtactttactattactgagaaccaatgggagaatggctaatggagggtggggcggagctcagctagccattactactttgattatcaatggttagatggatgtgtgcttcatttttttctccctcaatttaccaaagggttactttgaatttttcttagctaagagacaccatttaagaccacagatttgaaaataatgtctgataagggacttgtttctagaatatataaagaaccattgtaactcaataatatatagacaaataacaatgaaatggttaaaagacctgaatttagacatttctccaaagaaaatatgcaagtggttggctgggtgcagtggcccatgcctataatcccagcactttgggaggccgaggtgggcggatcacctgaggtcaggagttcgaaactagcctggccaacctggtgaaaccccatctctactaaaaatgcaaaaattaactgggtgtggtggtgggtgcctataatcccagctactcgggaggctgaggcaggagaatcacttgaacccgggagacggaggttgcagtgagctgagatcacgccattggactccagcctgggcaacagagcgagactccatcacaaaaaaaacaacaaaaaaaaccacaagtggccaataaacacatgaaaaaatgcttaatattgttagctgttagggaaatgcagatcaaaaccacaatgagataccactttatatctactaggatggctataaataaaaagtcagataataacaagtactggcaagaatgtagagaaattgaaaatcctcatacactgagagtgagaatttaaatggaatgctgctttggaaaacagtttgtcagttcttcagaaaacgaaacataacattgccctctgacccagaaattctgctcctagctatacattcaagagaaatgaaagcatatgtttacacagaaacttgtgaatgagtgttcatagaagcattatttataatagccaaaaagtagaaacaacctaaatgtctgttaagagatgaatggataaataaaaggtggtatagccatatgatgaaaaatgaatacatgctactgtatgaatgacacttgagaacataatgctaagtgaaagaagccagtcataaaaggccatgtatatatgattccatttatatgaaatgtgcaggacagacacatctatatagatagagagtaaatgaatgattttctaggtctagaggtttggaaagaaatggggagtgatggctaatgggtacaggttttctttttactccctagggtgataaaaattttctaaaattgattttggtgatggttatgcaattctgtggatatgttacaagctgttgaactgtacattgtcagtgggtaagttttatggtgtgacttacatctcaatagagctattttaaacaatggaacacagctgcaaatgaatacctaccatagctaaaagaagggtcttaaatcactataaactatcactacatgacgtcagccacatttcagagaccatgggctatgaaatgattaggtctctcatttttttaggttggagacattgtattttgtatggatgttttctccatggcaagttgtagtctgtcaggaggtgtagctttcttccctgaagggtggaatatcacccttcccccgccccaacaattgtgttatataacatgctgttagcttcgctggcatgcttgccacatgccactttgtgctgtgaccccccacacatttgcttgataaataattacccgttctgtgaaagttctcccacacatcacattcaggcactgcttaaagaaaatgcttcccgttttgctctcattaatctgacatttcgaatattatatttggtttcattttgcctggttcccatatcactcttgaaaggatggcaagatgcttctgacttgtagaattcacttatttatatttttatgttgaggaagagaggaggaaatcacctatgtatctgaagcactggcgttttacagtgattttataccagcaactttatttagtatctgtttgcatgatgctgtaccgtttctcaatttaaaagagtgagttaagagcatgttgccttcagaagcccatgcaatttgactgaatatgagaatgtttgtataacacattaactgtactaatatttgtaagcattttatagagcctcacatccaggcacctagacaattgttgactgtttttggcactgaggatacagcaataaactagaaattaaaagacttgaaattgagggaactcacagaccaggaggatttagaagcaagtaacagttcagaggtctaaggtgctgtgggagttgagcagcatgggggagtgtggggttggctggaagagcttactaaagaaagtgatttttaaaattgactcttgaagatgaggtaaccagtttggagactcagaggaaggggggcccaaggcaaaaaggaatcacaggaagtatggagaacacatgttgagataatcctttaaatcagaggttctcaactgtgggcgatgttgctcctaggggacactgggcaatatctggagacactgatataatgtattttaactgtgtgtttgggggctgggggttagaagagggcagggagttgctacagacatctagagggtagagggcagctgtgctgctgaacaccctccagggcacagggcaggcttctgcaacaaaacatcatctgctccaaaatgtcaggagtgccactgttgagaagtcctgatttaatgcatgtgataagatagagacccctacaaatacttgtggaattgaatggaagtaaatttttttttttttgagacggagtcttgccctgtcccccaggctggagcgcagtggcgtgatcttggctcactgcaacctctgcctcctgggttctagcgattctcctgcctcagcctcctgagtagctgggattacaggtgtgagccaccatgcccagctaatttttgtatttttagtagagacgggtttcaccttgttggtcaggctggtcttaaactcctgacctcaggtgatccacctgcctcagcctcccaaagtgctgggattacagacgtgagccactgctcccggcaggaagtaaactttttaaatgtaaatttttttttatgtaagtggaattatacctttttattgaaatatatatatttcaatatatatattattattctctctatatataatactattctatatatatagaaatacatatttcaataaaaaggtataataagaatatatatatttcagtaaatatatatcacatgtatttcacatatttcatatgtatttcatatatatttatatatttatataatctatatatagaactatatatatatatttcaataaaaagtaaccatagtttaatttggttatagtataagcaatgaagtaaagccagatggaaagggctttgtgtcttgactcttccatgtgatttgttcaatgatgatcagttactcgggaactaccaagataccagtgtagaaagaagagcaaagtaagttattttaacagaattttagtggaactgatagaacatggagtgggtagaattagaaacagcatttctagtatataggtctctgtgtttttcatagaatgtaagaattttccctaaagatgatactgttgatggtgatgtattgaaagacacattttatatgggctgtgatatttaaatggaaatctgaattgacattaatatggatttatttttaaattgtatgctgaaggatactggagcatgggccatagaaaaatttttagcttttctgaaaataaagccagaataaaaagttttctacaagagtttttgtggagatatgtttttattaatcttgcataaatactttggtgtgggaattgctggggtatggtatatgtatgtttgacttctcaggcaattaaggttacaaagtaattttaccctcccatcagcagtgtatgagagttctatttgctccacttccttactaacctttggttatgttactctttttcattttagccaattttgactagagatgttgagcacttcttcctgtgcttattggccatttatgtttcttctgtcatgaagtgtctattaaaatctcctgcccatttaaaaattgtgttgttgatctttttgttactcaattgtaggaattatttagaaacaaatcatttaccggatataataatagtgaatattttctctgatctgtggcttgcctatctttttcttcagtgtcttttgatgagaagaacattttaacttgaggttgaatttatcagtttaaaaacattttattaagggcttcttgcaccaagaaatattttttttactctatggttttgaagaaattttctgatgttttcttttaaagctttataattagtccatgactcatgaagatttttggggtatatatggtgtgagacatgagggttgaggtttgtttattttttccccaggtgaatagccagtatttccatcaccatttattgatagacttgcctctcatttaattgttttggcaccttctaaaaaatcacttgactgtgcatctgtaggtctatttctagattctctactctgttgcatctctttgtctgttcttttgccagtaacacacttaccttgattactgtgtcattagtcaggtggcacaagtcctctgttctttttaaaacaattttggctattgtaggtccttggtgtttccatataaattttagaattaatttatttttataagaaaacccccaaaacccataggtcaatattgtgaatatagaaccttacagttcatgaacttgattttccatttatttagactttccatttatcccagtaatgttttacagttttcagcatagaagtcatgggcattttttttttggtgttaaattttcctaaatattttatgtttctgcatgataatttaaaatatttgttttacctttaatttccaactggtcactattagcatgtagaaacatacttggtttttgtatcttacaatattgctaagtgcacttattctgttagttctggcagtttctttaggatttttaaatgtacacagtgattttatatgtgacaaaaacagccttagggccaggcatggtggttgacacctgtaatcccagcactttagaaagctgaggcaggaagatcacttgagctcagggttagagaccagcctaggcaatgtaatgagataatgagaccctgtctcaaaaaaaaaaaaaaaaaaaaaaattagccaggtatggtggtatgtgcctgtagtcccagctactcaggaggctgaggtgggaagacagtttgagcccaggaggttcaaagctgcagtgagccataatcgtgtcactgtactacagcctgggcaacagagagagaccctgtctcaaaaaaaaaaaaaagacagctttatttcttcctttccaatctgtatgctttttatttcttttacttgcctgcctacactgcctgagattgcctgtaaaacgtttggcagaagtggtgttattggccatcttgccttgttcctgatcttagtaggaaaagtgttcattatttaaagtgtaacattagctgaaaattgcttgtagatgcccttttcattttgaggaagtttttattcccagttttaagcatgaattggttggaattttgacaaaatgtttctcagtgtctcttgaaatgatcattaaatatgtttctttaatctttggatgtgaattacactgaattttgtaagttaacctcacatttctgagattaaactctacttggtcatgatgtactagctttttgtacctgcttcatccattttgctagtattcggttaaggatttttaaatttatgttcatgagagatgtgtgcgttatgatcttcattttttatgtccttctctggttttggtaccaaggttaagatggctacagaagaattgggaagttttcccttcttcactgttttttcataaatgtgtgtgtcatattggtattaagtgtttgaggtaattcacctatgaagtcatctttgcctagagttttcttggtgagaagtttaaaaattttaaattcattttatttagaggatataatgatattcagattttctatttttcttgggttttgataaattgtggttttcaaggaatttattttctctaaattgttgactttattggcataaatgtcatatctacttgttcctttcatatctataggatttataatggtaacttatgcttggtagggatttttgtttcatattttcttgataagtcttgcctagaggtttatcaattttgttaatattttcagagaatccatattaaccactttttatttcatttgtttctgaatttattttttttcaactttggatttaatttttcttttcattccctaagttagaagcacagatcattaattttacaccttgtttttgagatgggcatttgaatctataagttttctcctaaggactgtttcagctgtttttattataattcagttaaaaattatttatttccttatgtgattaggctatagatcgaaaacgtgatatttagaagtattttttaaaaattccaaatggctggagatattccacatgtaatattattgctttttttctacttaagtattcttttggtcagagaaaacagtttatagtctatcaatatgtattgaatatcgaaaggatttttttgcatatgtgcataatgacccttttatgaaatatctctgtgctaataattatcttaaactctacctctaacagtaatatagctacacttgctttcttatactgttcgtacagcatgtcttttttcacccttttccttttatctgattctttatgtttaaacttttttttataaacagcatatacttgagttctgtttttaaaaaaatatgctagccattgctttttaagcagagttttagtttatatataataattattattttattattattactatttttttgtagagatggggttttgctatgttgcccaggctggtcttgaactcctgacttcaagccatcttccttccttggcttcctaaagtgctgtgattacaggcatgagccactatgcccagctgatccatatataatgtttgatacgtatgggcttaaatctgccatcttgattttgatttctagtttccatgtttgcttttcttagttttttttgctgttgccttttctaatgatttttagttatgccttttaatgtattttttagatagtgtctcagagtataacatgcattttaaaataatcataatatctgccttctcaaaaataaagacccttagaacagtggatgacttccaatcatcctttcgctctctgtgctcttgttactatatattctaattctacatacactatgaatgtgggaattacatagcatttgaactacatatgttatgaagtaattatacatgactacttttattttatgaaatcagtaatcagtggtcttttaaagaaatttactgtttatttacatacaggtatatgcatacatgtgggtgtaactttttttggctatatgtgtatatttatttatttttttgagacagagtctcgctctgttgcccaggcagcgtgttctcagctcactgctagctctgcctcctgggttcacgccattctcctgcctcagcctcccgagaagctgggactacaggcgcctgccaccacgcctggctaattttttgtatttttagtagagatggggtttcaccatgttatctagaatgggccatattttttttaacactaacgtatttgtcctttatggttttctttattcttttctgcaaaactgggtttttatcttgttccatttcttttaagttccttaggctgccttaggctgcatttcttgtaatgcaggtctgctagagaagatttctttcctattttgtctgtctgaaaatgtcttttatattgccttcatttttgatggatatagaattgttttcatagatttccccttatacatcttaaagaagtcatttcattgtcttcaggcttccgtttattttctgatgataagtcatccatttttcttatcagtctctcctctctcctctgttgtctttctctcttgctgctttccttatttctttttaaataatttttatgatttttttttttgccttgcccagggttccattgaggttcttggatgtgtaggtttgatatttcttactgcccggtttagaaaatcttagtcattatctcttcaaatgtgtcttctactccattttctgtttattttttgggattcgaattaccttatgtcagagcatttgatactgcccctggagatttcagattctctgtttcacttttcccacctgatttccatttgtgtgtgtttggatcatttctgtccatcttcaaaaccattcagtaggaagtttcaaaccttcccacatcttcctgtcttcttctgacccctccaaactgtttcagcctctgcctaggttatctttagagagaaagagagatggggtggggtgggatgggttgaggaactgccaaacacttttaaaccaccagatcttgtgagaactcaatcactatcaggagagcagcacgggggaaccactcctgtgatccatcaccttataccttacaccagatccctttctcgacatgtggggattacaattcgagaaaccctccaggcaggccatgccatctctgagtaggacacagagtaggtggattaggacacagagtagcccattggatccacctcagggtggtctctcagtcctgctctcagacttcctcatgagcgcttgaggtcccacggacaagagttggagggcgggttcagactctctgtgtctaggtctcctaggaattctaaacatcacaccagcctgtgttctacctttaaaattttgttaaaattccactgttttctttgtctgtgatggtttcctctttgtcttgctgctccaccatggatgaaagcagctggggtgtgtgtgtgtgtgcatgcgtgtgtgtgtgtgtgtctgtgtctgtgtctgtgtgtctttgtcttctgtccagggagtggcttgtcactctttggattttcattcattaggtcttttttacatctttgctcttaaatgagtttttgaaaaacaatggtttcataggttctccatcttgttcttattggtagagtgggaatgatgttctctgataattttttacattccaggtggaagcaacagttctctaatgattaattgcttgaattcactttcattggaacatacaatcttctgactgtcattgctcgtgtgctctattagaaacttttttttttggtgaacagaagaaagaagttactataaagacttgaccttgagtaaaattaggcaacatgcttttatcatctctggaaaaaaatgcatgattcatagatttatactttgtttttttcccagaaactctatgagaaactgattacatttctataactttaaaaactttttttggcttcagcagtttccccttctcataataaaatgtagggcagaacttgttacgtgctgggttttttttttttttccttttcaacattcctcttagaaaagcaatagaatattcctgattgttaccattataagttttgatatctgcttctttgtttattcacttaagtgctactctgtttacaataatgtctccttagacttgtgaatgtttctctctgcttttttcgttgtgtattttctgaatttataagctcagtaatctgtcacttaaaacacaagggtaaagcctgtcttctacatggtttgatagagctatagaacatgcagttgaaagagacttaatagatacagagtgaaatgtagaatacagataataggcagtttcttatgcttgggctgagggtggtgcctgattggtgataccatgtatttgtatttgtattttttttctgaatgaatgaatgaaagaggttgagatgctgatttatgaatttaagaattcttttaaaaagaatttatgaatttaagaacttgtttaatattgtttcttcagattccaattcccaaacttaggtactacagataataattagggttttagataaagattatcctggcagcttgccctttttcacttggtttatttttttcgttcatgaaatttatacttttgcctgtgtattcaccaggaatcagttctgacttgctgtatgtgatgagttatccagagcttaaaatggtatctggaacttagtaggtactcagattgtagtgtggtttaagtgaattattaggtgagtgagaaaatggcagtgttctcagctgaaccagtagaatgcattgcagcaatatggctccaagaacccccagtcggaactttctcagttctaattcttgctctaatggagtcactagtgttagcttctccatgaaacaaagatgtgattgctattttttccctccttcctccctttccacccttctctgtctataaataaattcaacaacaacaacaacaacaacaacacgccttgagacaggttcttgttattttgcccaggctggtctcaaactcctgggttcaagcaatcctcctgcctcagcttcccaaagtttattttttatttaaatgcgaataatccaatatactttgcaaagttttctgttctttactattctgagattcaccatatttcctttacatccattaaattttattaataaaatatgtcctttgtttcaaaaactacagaatttttatattttggtttaacagtgtgttgctattgattttggcagtttgaaatgtgtccaatgtttctcaaagtctcattctttcttagtgatgtcctaagcaattgattatgagaaaagaaaaacttgagaaatttgaaatggttgaaacatgttctagcaaacgttttatttttcctacactaatactttagaggcagggaatcagtaaatagaaaatgaatatgagcagtctttgtgagagggtgggaacccagccttatttaatactagtggctgatccctttaatgttaaagtaatgcgttgcaagtgtgaagtgttctgaagaatgtagactgtgatgagttaattctcaatagtggaactgttttgagttatcattacattatttgccaaaatataaacaaatggaattctttccttgtgaatgatccatttctacttaatctctcatctttcaacaaatttgttctctgctggcttccacaaagggctgtgtggctcaagtttgagtcgttgtgcttggaggcaagacatataatactactttactttttaagcttctttggatttttatccagaaataatatggctgtttaatctgaagcctgataattgctttttcccttacttcagtatttgtacttctagtcataactctttaagcccttcatcattcaacagttatttctgtgttttaggttactagaatcagtcattcttcctgtccagcatctgtatttgctgctctatgtgtaactggtgaagaatatacaaccatctatcttgagttaatattatttttcctccacatatgagcatcagtggaaaactttaggggaaaacaaaaaggaactagagaggacaaggaatttccttaggctcatggccgactttgagagtgtaagtatatgtaagtatattaggtccttacttgctgcagtggttcgtgattgtcactgaattcctttactagttactgatggtatattgtagttgatctgtcttctatttgttattcttggagcaacagctttcatactcatcattttgttgcccatgacatgtagaagcacttctggaatatttcccaagcccattcattgtttcttttttcatttttgccattttgtatcatccttttagtcttctaatatgtttttgcattcaactcttgcctatcttcagtccattctccacccagcaaccagactgttcatgtgcaattttaacctgatctggctgttcccctactaaaaacctttagtggcacttaggataaattaaatccttagcatggtgtattaattcattctcacactgctgcaaagaactgcctgagattggataatttataaagaaaagaggttgaggccgggcgcagtggctcatgcctgtaatcccagcactttaggaggccgaggtgggccgatcaccttgtcaggagtgacctggtcaggagtttgagaccagcctggccaacatggagaagccctgtctctactaaaaatagaaaaattagctgggtgtagtggctgtgcacctgtagtcccagttacccagaggctgaggtaggagaattgcttgaacctgggaggtggaggttgcagtaagccgagactgcaccactgcactccagtctgggagacagagcgaaactccatctcaaaaataaagaaggggaggggaagggaggtttaattgacttagttttgtaggctgtacaggaacaggaggcatgggtggggaggcctcaggaaacttataatcatggcagaaggcaaaggggaagccagtatgtcttacatggccagatcagggggaagagagagagaagtgggaggggagggcgggggtgtgtggggcaggctatatactttccaaaaaccagatcctgtgagaactctcatggaagcaaaagcaagaagggggaagtctacccctatgatcaagtcacctcccaccaggccccttctccaactttgggaattgtaaatgctacatgagatttgggtggggacccagagccaaaccatcccacatggccagggaggccctgtgtggctggaccccagtctgcctccacagctttctgttgtgccactctccagcaggctcatggcgccagtgaggaggctgatcttagctcctccagagtgtgcttttggtcttctatgcaccttctcagcttaggggacaactctgcattcaaaaaaaacttttctgagagactactttttaaagagtagttttcagttcacagtcagaagaggaagatagagattttccttattccccccaactcccacacatgcatagcattccccattatcaacacccccaccagaatgctgcatttgttagaactgtggaacctaccttgacatatcataatcacccaaaattcatagtttacattagggctcactcttggattgtacattttatgggtttgcccaaatgtgtactgaatgtatccatcattctagtatcatacagaagatttcactgccctaaaaatcttgtgctccacctgttcatccctttccctccagtccctggcaaccagtgatctttttactgtctctgtagtttgaccttttccagagtgtcatctacttgaatcacacagtgtgtagacttttcagataggcttctttcactgagtagcatacatttaagctccctccatgtcttctcatggctcagtagctcatttctttttagcaccgaataatactccattgtcaggatgtactacagtttattcattcaccttctgaggacatcttggctgcttcaaagttttggtggttgtgagtcaaacataatttggtagttgtgaataaacatccatgtgcaggttcttgtgtagacatagttttcagttcctttaggtaactgccaaggaatgtgattgctgtgtcctacagtaaaaatgtttttacttttgtaagaaacaaccagactttgaaagtgtaccattttgcattgccaccagcaatgaataagagttcctgttgctccacatcctcttcaacatttggtgttgtcagtgttttgggttttggctgttctagtgagtgtgttgtatttcattttaatttgcattgccttgatgacatctgatagggtgcatcttttctttctttctttctttattttattattattatactttaagttttagggtacatgtgcacaatgtgcaggttagttacatatgtatacacgtgccatgctggtgtgctgcatccattaactcgtcatttagcattaggtatatctcctaatgctatccctcccccgtccccccaccccacaacaatccccagagtatgatgttccccttcctgtgtccatgtgttctcattgttcagttcccacctatgagtgagaacatgcagtgtttggttttttgtccttgtgatagtttactgataatgatgatttccaatttcatccatgtccctacaaggacatgagctcatcattttttatggctgcatagtattccatgatgtatatgtgccaccttttcttaatccagtctatcgttgttggacatttgggttggttccaagtctttgctattgtgaatagtgccacaataaacatacgtgtgcatgtgtctttatagcaacatgatttatagtcctttgggtatatacccagtaatgggattgctgggtcaaatagtatttctagttctagatccctgaggaatcgccacactgacttccacaatggttgaactagtttacagtcccaccaacagtgtaaaagtgttcctatttctccacatcctctccagcatctgttgtttcctgactttttaatgatcgccattctaactggtgtgagatggtatctcattgtggatttgatttgcatttctctgatggccagtgatggtgagcattttttcatgtgttttttggctgcataaatgtcttcttttgagaagtgtctgttcatatcctttgcccactttttgatggggttgtttgtttttttcttgtaaatttatttgagttcattgtagattctggatattagctctttgtcagatgagtaggttgcgaaaattttctcccattttgtaggttgcctgatcactctgatggtagtttcttttgctgtgcagaagctcttcagtttaattagatcccatttgtcaattttggcttttgttgccattgcttttggtgttttagacatgaagtccttgcccatgcctatgtcctgaatggtaatgcctaggttttcttctagggtttttatggttttaggtctaacatttaagtctttaatccatcttgaattaatttttgtataaggtgtaaggaagggatccagtttcagctttctacatatggccagccagttttcacagcaccatttattaaatagggaatcctttccccattgcttgtttttctcaggtttgtcaaagatcagatagttgtagatatgcggcgttatttctgagggctctgttctgttccattgatctatatctctgttttggtaccagtaccatgctgttttggttactgtagccttgtagtatagtttgaagtcaggtagcgtgatgcctccagctttgttcttttggcttaggattgacttggcgatgtgggctcttttttggttccatatgagctttaaagtagttttttccagttctgtgaagaaagtcattggtagcttgatggggatggcattgaatctataaattaccttgggcagtatggccattttcacgatattgattcttcctatccatgagcatggaatgttcttccatttgtttgtattctgttttctttcattgagcagtggtttgtagttctccttgaagaggtccttcacgttccttgtaagttggatttctaggtattttattctctttgaagcaattgtgaatgggaattcactcatgatttggctctctttgtctgttatttgtgtataagaatgcttgtgatttttgtacattgattttgtatcctgagactttgctgaaggtgcatcttttcttaacgctcctctgccatttgtatattcatatgtatattccatatgaaccattaattccatttcttgatatatacctgaaagaattgaaagcaggggcctgaacaggtatttgtacatccatgttcatagcagcactgttcgcaacaggcaaaaaggtggaagcaacccaagtgtctgcggatattgtgaatggataagaaaaatgtggtatatacacacacaatggaatattaggcttttatgtagcaattgaaagttattgttcaacaggtacagagtttcagttttgcaagatgaaaaaagttctgttaatggatggtggtgatggttatgtaacattgtgaacatatttaatgccattgaactctacacttaaaaatcgttaagatgataaattttaggttacatgtattttaccacagataaaagtaaaaaaaaaaatggttacaacagttaaatcttaggaaaaacttgccttttcgtggccaaggggtaacctgatatgttactggtgtctttcaggcctggcgtttccttgaccatgcaggcattttccgaagaggaaaggaagcagtggttggaagctctgggtggaaaggaagctgtaagaataatcaatggttgagttttatttcaaagcctttagagttgacttgcattcatttttatgttatttttgtgtagtatttgagaaaagttcccttctgtaacaggtattccaaaaatcatcgtggaagcattcaacattctagtaatttgggttgggcaagcagcagtacatataagactagtgtatcattagtttttatttctgtattttcttgacttgccactctgatttgctttgcttgaggaggtcatctaaattctcaatttcatctttcctacttgacagtactttggatgatgaacacaataaatgcctgcaatgcattttgatctcagtggagatggaacaggaaatgtgagatagtgcaggcaatattataggtgactgctgtaattgttttgcttgatgtaacaatttaaagtttcatctagtagtttacagtatgcagtattatgtagccttagtggatgggcctcggtattcagagtgctttgaggaataaattgaaggtagtggtatagatccagaggcaccaagattcagtctgttggccactattgaaacactactttcattttgatggactagtggcttttgagagttgagaatgtggcagatcatgtattggggatttagtgaggataattgtagaaaacgccacagaaccaatttaaataaactctacttaaagtattatgtatgactctaaataaactgccattgcaggtgccaggcaggcttatctggaaagcatttgccagttcagcattgttgagggaaaaaaaaagagaatggtttgaaagtagaggagggatcatgtagagcagaaacaggtttcagaatagagcttatgaaatgggcaaaagctaatgttatcttgtggtaacagagagcgcattggtgagtgtataggaaaagagagcaaggaggctgatcagtagcgcatgtggcaatcttgaagtacatggaaaatgaaaacctaaattaacatagtataaaaattgatgctatattggggaatgtatcactcttacaccacccccgccaaaaacaaagcatccttggtcagatttgggtgtcgtcttaccatatttgggatgcatttagcctctgtagttttacttctattgattgatcgatggaatctcactctgttgcccagtctgcagtgcagtggcgtgaccttggctcactgcaacctctgcctcctgggtttaagtgattctcctgcttcagcctcccaagtagctgggattacaggtgtgtgtcaccatgcccagctaatttttgtaatttttagtagagacagggtttcaccatgttggccaggttgttcttgaactcctgacctcaaacgatccacccaccttggcctcccaaagtgctgggattacaggcatgagccaccacacccagccttatttctatttattcttaatttgttgttgaaatttttagctgtgaatcaagagtatttacagtgtttatggttactgagactccaaaacaggttatactagtcttctttagtaaagacagcacactcactggaatgtatcgccccagagatgcaggaagtatattggatttgcatccattaaaatacagaaaaaaaataatggtactttggaaagtcagtttgcgtagcgaaaagactaagtcattgaaaaatgagtctgttggcaatgtcagtgtaaccttcaagacgtatataacctctcttttagagtcaggagccaagtgattagttcagagatacacagacaaaggcaagtctgcagaaaaacaatattcagctatgtatttatatggggacactgaagggactgcatatttttggtgggtgttgtaagccttgcaaataatttgccagccttacagttcttaaaggttgcctagaattatcaccgtgctatttctgctgtacttacttaaattatgggcaggagttatctctttaggtaaatactgattttttgaaatattggtgaaaacatgagctccatcttaatggttagaatacagcagtttccttatcactccatagctgtacggctgagtatttcaagtatacacaaattttcaataagtcccttttaaggaccctgccccctttatcttatttttgctcatttggtatacctcagggagagaaaaagtagtctcagagatgttcctttttgttatttatctttgcatctgagcatatgatagtgtgttattaactgagaaaacacagcgcactatctgcctgaagttagtgttggatcccacatgtttagagctcactcccacaagactgcctgagttcaggtgcccatcacaagtctggaccctcccatacttctggctaactggctataaattgggggttcccgtgaacccctcatcagtttaataatttgccagattagctcacagaactgagagaaatacttatatttagtagtacattataaaagttacaactctgcaagggcccagtggaagagatgcataggataaagtctgaagtgaggttgaggtgggtgcacggagcccccatgccctcagtgggtacaccagcctcccagcacttcctcatgttcaccaacacggaagcttatcagagcttgttgtttcagaactcaattgccagctcactgctgaagagattggtgggtagggctgaaagaaatatcagtgggtctttgtggtattcagccccatcctgagatggcctatccaggggctctataagaagtcacctcattagcataaactcacatgtgaccaaaaggatcttgttatgaataacaaaagatgttcttattactcaggaaatcccaagagtttagatgctctgtgtcaggaagtggggatgcagaccaatttcttattctatcacattaaccagaatcaagcttataaaaatgtatttttttttgtatggtcctcagtgtgcctacttgaataatttttgctgatttgattaaaaaattctgtttttccattctcttttattagctgtcccatagttttaatacagccatcatcccaagaccagaaggaagtaagtgctcatttataaaaatgattgtatcctccttttccatctattactttgtgtacattatgcatgtcaagctgttgctgggagcttactctctgcaccctctattagacagaggggtattacacgtaataatcctctattgcatgtgttctgttttactcaacggggacctcctcaacatttcttggactactgtagcccttgttgatctttcccatctgtgggcttttcttttctttttttttgatacaaagtcttgctctgttgcccaggctgcagtgcagtggcatggtcttggatccctgcagcttcaacctcctgggctcaagtgatcctcccacttcagtctcctgagtagctgggactacaggcatgtaccaccatacctggccaattgtttttatttttaatttttttgttgttgttgagatgggatcttgctatgttgtccaggctggtctcaaactcctggggtcaagtgatcctcctacctctgccttccaaagtgctgagattacaggcgtgagtcaccttgcctggcctatgggcttttttgtgagtctttctcaaaaaaaaaaaaattgtacaaaatactttctctacatttactttaatgtttattaacaatcacataagagtttcaagtatgcaaccttcaacttcttgtctgagttaactcctgtgggtaagagctgtttatatcgaggccctgtttcctagccttgatatgctttatctttgtagtgtttgactacaggctatacagatagtttatcagtgcaccttggacaatagcaacaacaattaaatttattcaaatattcaaggacaacgatcttcacatgccactgctgtacttgaagaaaatgaaacatgcccagctctgtacccttgatttttttttttaacttacataaaaacgtgatcagatctgctgggttcctgatgaatttacttttgacatatttggaaaaattaagctacatttatcaaatgtccacagtttgtaaacactgtggttatgtaacataggattccaatataattgtgatcacttgagccagtgtttgaataaaacacaactcttgtagcctggcactggtgatggacaggatgccacaagcagcacatcccctgaggcaccttcttacccctcttccttcttcccttctccctctctcctttgttcttttcttcttctgacaccttttcttccttcctccctcctcctcttcctcccttttctttccctttcctcattccctcctctcccctttctctttccttcttttctctttttcccttcttattgcagagatgttaaaacatgtcttttttagaaaacacagttttgctaagcagaaataaatacttccattttataaagctttgtgaatagtgaattcttgagcagaaaaccactgcccactgcccaattcattaaaattctcttcaagcttagcactatgggttatgtatgaagtttatattcatggattgttcttgtaacccttctgagagccaaggattagtgttactgttccctaggttctaaatgcagtggctaagggtacttaacttaatttttgttgttgtcgttgttgttggagacagagtcttgctctgtcgcccaggctgcagtgcaggggcgcaatttcagctccctgcaagctccgcctcccgggttcactccgttttcctgtctcaacctcccgagtaactgggactacaggtgcccaccatcacgcccggctaatttattgtatttttagtagagacggggtttcaccgtgttagccaggatggtctcgatctcctgacttcgtgatccgcccaccttggcctcccaaagtgctgggattacaggcgtggagccaccgcgcctggcctcttaacttaatttttgaaacaagaattgtcattcattaaggatatacagatatgccagcctaatcatagataagcatctatattagaaaaagtataaaaattatatttccaaaatagtttgctctgccatatgaatcatctgttttaaatttattatgaaaataataaaatattattttaaaagcttggagcatggtgtaaaatatcaaaattttaattcaagcttattgcccaaatatttttaaaaagcttttcttaaaatttttcctcctaggtttttttttttaaaggattgtgttcttagattctcaagtaatttaagaacattcacgtgtgtgtgtgtgtgtgtgtgtgtgtgtgtgtgtatagttttctttaactgagctgctgttggaatttttggcaaaatatatcttaactgtgtctagatagcttcccttagagatttgtatcactttctttttgacttttaaaatgaattgtagttattaattttaaaattattttacattacaaatatgtatactattggtaaatagagattctgatattccagcaagtgctctaaatatatgaaattccttccaggcacagtggctcacacctgtaatcccagcactttgggatgccaaagtggtcagatcacctgaggtcaggaattcaagaccagcctggccaacatggtgaaaccccatctctactaaaaatagaaaaaattagctgggcttggtggcgggcacctgtaatggcagctacctgggaggctgaggtggaagaatcgcttgaacccaggaggtagaggttgcactctagcttgggtgacagagtaagactccctctcaaaacaaaaacaaaaaacaaacaaacaaacaaatatagatatatatatagatatatatatatatatatataaaattcctgtgtatattatttaaataggaaatacatagccttaagcttttttttttttttttttttttttttggggagacagggtattgctctgtcacccagtgcagtggtatgatcataactcactgcagcctctacctgctgggctcaagctatccttcttcagcctcctgagcagctgggactacaggcacccatcattaaacctggctaatttaaaaacatcttcagtagaggtggggcctcaccatgttccccaggcaagtcaggaactcccagactcaagtgatcattctccctgggcctcccaaagtggtgggattacaggtgtgagccaatgtgcctatctgcctttagctttttaatagtaatctaaaaattagtttggatttaaataatttttcctatttttaaaaggaagagaaatgtgataaataataattgtacacttaatgttttaaactgtttcttgtagatgcacagttggataagatggggttcacaattatcagaaaatgcatcagtgccgttgaaacacgaggtaatatgattgaatcatttcattcatgagaggctataggtatgtaaaatctaaaagtcattaaaaatacttcttgcttttaagtgttacagaatgaaacgtgttaacacaaatgctcattctgagtatcagaaggatcagttattcatttactatgacaatgagggattttcctttttatttacatatttctttcctatatgaaaacatgaggtcagtgttgaaatgagaattgtcttagtctgttagatctgccatagcaagataccacagattgggtggcttaaagaatagaaatttattttctcgtggttctggaggctggaagttcaaaatcaaggtgtcaaattcaaggtttcttctgaggcctccccacttggcttgcaggtggcccccttcccgctttgtccttagaatgccttttttcctttgcacccatgtccctggtgtctcttttacatgtcgaagtttcttcttataagggcctattagattagggcccaccctaaaggcctctttaaagctcccatctctaaatacagtcacattctgagaaactggtgtttagggcttctacataagaattttagggggatacagttcagcccataagaatccttagaagaatcagcagtgatgtacaactcatcgtaatcacttttggttgaagcactctgaagatactctccaccctccattgttgtgtgggtccctgtttaaaaaaatcagcttgccagacgtggtggctcacgctggtaatcccagcactttgggaggctgcggtgggcagatcacctgaggctgggagttcgagaccatcctggcgaacatggtgaaaccccatctctactaaaaatacaaaaattagctgggtgtggtgcatgcatctataatcgcggctactcgggaggctgaggcaggagaatcagttgaacctgggaggcagaggttgcagtgagccgagatcgtgtcactgcactccagcctgggtgatagagcgagattgcatctcaaaaaaagaaatccgctttattgaggtataatttgcagtcagtacaattcactgatttcagctgtacaaatggaagagttttgaattgaaaacatacacaattgtgatactttattacatacacagaaaatttctgtttccctcactgagttcttttctggcacctaccttcctcctttcctgtatttgctgcgttgcatttttatttttatttttatttttttaagatagggcctcactctgtcacccaggctggagtgtggtggtgcagccatagctcactgcagcctcaaattcctgggctcaagtgatcctcctgcctgggcctcccaaaatactggaattatagacatgagccaccatgcttgtccctgagctattttttaattacgcatgttctgcgctccccccccccttttttttttttaacatcttcagcattttttgtacaaatggaatcatgcagttcatagtcttttgactctggctttgtctgtgtaatgcttttgagattcatcggttgggtggatacttagctctgtaaatttctgtttattgcctggtagtattccattatatggatatagaccacaatttgtttatccattcacctattgataaatatttgggttgtttgtgtttctgttttaaatttagggaaaactaattcctccgctgaccaataacccaaaacatttttttttaagtctctaagcaaaaattgggcccttttgctatgcagccattccagcagactttggagatactaaatattaaacattgcaaaacaggctatttctggaggttgacattctctttgtttagcgatctagtgaagtatgtataaatggaatatttaattcactctcatatattctgtattccagtccgactttggatgccttagtggggtgaagtactgccttcacattctctctccaaacaaggtctttgttataaagacaggactgccacctatgaaactagtgtgtaggatatcggcggagtaggagctgttgtatgatttggggatttgcccatcaataacaacaacgtatgccacagaaagccattcttcccacattctcttacagtggcaattcacactggcaggttttcattcatttcaatctgcactgaagctgagctggcaatttgtttcttatcctggtacctcgaaagaatttcagaaaaaatccctgcaattttagtatctttcacttgacactcatgtttctttttttctgagtttcttaagtagaactttgtgtcatttgcatgcttattaatttggataaattctttcccaaaagggcatgttttatacatacttatttctgcctgaatagatgcagatctatctagaaggctttctgattggtatgtgtagttttatggagtgttacatacattgaatggcataaatatatattggaatctggaggcattgaatatgtttttataagtatatagatgttgaataggtctacacattttatgttagcttttctcatttaaaaataagagacaaaaagcatatatttttctttttgaatatttttccccccaaaggtcttccattactgaaacttttgctttcagtggagtaatagactaaaaataagagtttaaaagaatcaacagaacttattattgaaaatgatgaggacagctgggggcactggctcacacctataatcccagcactttgggaggttgaggtgggaggattgcttgagcccaagagttcaagaccagtctgggcaacatagcatgaccctgtctgtataaaaatttttttaaaaaaattagctgagtgttatagtgtttgcttgtagtgacagctactcaggaggctgaggcgggaggatcactggatcccaggggtcgaggctacagtgagcttggaaaacaggtaaagagatggaaatagttggtaaatagcattaataactattgtacacttcttgagtctatgtgactgatgaccagaagcatttaatgagatctaattgaagaattacttctaatcaccgtttccatgttctaaatatgattatctaaaaactagtatttcatatggttcggttaaagccattagcctttttcttaccttttcatttcatgtctttctgtttttgatctgactgcttagaacatatttattggaacataaacataaactcaaaagactactgtgacaatacttactattttatggcatttttcttaagctatctattcagtatgtgtatgacttatgaaatgttccatattttcctcttgtaactttgtcccatgggttgcaccaaccggaaaaagtttttagctttgagcacgaagtaatttttctctaattgtttttgtggccaaaagtttatttgccttggctcagaataaactggagaactggcagtgcccagattattcacaggacaaatactcaggaagcctgaacatcattaattgcattcacaggagcaatttctgtggctctgtagcagaaacttcagtgaatggtaaagatacggggtccatcgctgatgttataaaaggaagtgattccaaaagtccacatccaggaaaatttctacatggtatagctgcgggggcatatctagagggtaaaggcacagtgtactgcctgagaggagctcttttcgcaaacctagagcctggaagccaagttctgaagacagtggaattgccccttgttagtataattaacagattgttagcaaactcccagatcccattctttgcttgcccctacatctgcctcccagtaatggtggccagaggtgaactgaggggagccaggatacagattatgtgtttgaatctctcagcgtattctctgtgattcttttagaaatgtctccaacaaacataactctggtcatcaaaaattagaaattgattgttcctgtgtcaccatcaaagatcgcatgcacttggaacatcagcatcctttgattcaggtgtaggatagctctcagctggggctctacttcctttatttggaaactgtcttccccagctggtaattgggcctgatggcattcttcagagtgaccacagagcagaagagccacaatgaacctcccccatcaggttccttgaaaattgagctaatgtattgaaggcagcagacagagccacaatttagggacatgggtttttcaagatacgataaacagacaacacatgtacatctctaaattgttctgtcatagccacttgtctcctccactagggtcgcctgtgtcctccagctgcttccactgacagctcgattgtgaagtgagctccacttacaagaggcttgtatatagagggtcccttcccactgtgttcacattctactaatcctccttaattcaatcagattttgatttaattctgccataagttagtttttttctgaagccatagacagattagcataaacaaaggagatcattttaacttaagagtttcagaaagtagtatggacaaaatattatcttattctagattaggttgtatattttatagatgttgatagaagaataggattatgactaaaacttttgaaatgaaatatttgactttgaaattaatttttatgaatggagctaatttcatgtagtttttgatcatgaaaataaaatctcattttgattaatttatcacatttactcagaggtcttaaagtcgcatttattaaaccagtcctttattcaaaatgatgaataagatgatgaagatacccacttagaagtttattgtaaaaaaatcataaaactgttcacctgcaatcaggcagccttaggagagcctgtattttgtttggttttgtttggttacggtatcaaaaccaagatatttttataatcttactgcttctacaacatatgtatatataaaatgagatacatttatttaaatacactggattttggaggctgaataagaaaaataatttaaactctcattaagattttttttttttttttttttgagacagagtcttgctctgtggcctaggctggagtgcagtggcttgatctcggctcactgcaagctctgtctcctgggttcacaccattctcctgcctcagcctcctgagtagctgggactacaggtgcccgccaccaagcctggctaattttttgtatttttagtagagacagggtttcaccgtgttagccaggatggtcttgatctcctgacctcgtgatccacctgcctcggcctcccaaagtgctgtgattacaggtgtgagccactgcacccagccctcattaagatctttgaataatgtttttatgatcagtgtaaacccatatcgaaaaatgataacacattttgccaattgaaatcattttgacttggttccttttactttatttagtatgactactggaaaatgtataattgcataggtgggtcacattgtctttctgttggccatccctggtctggacttaggggcccttcatctccctagctgtccagcctacctggggcacagacctatcacggcagctgtgaggttgagtaagccagttggggaaatttaattcactatcactgggagtagcccaagctatgattgagtgagaaaagaaagaatatgtcatgtctctcacatgggtactgagaatctagttctgtctgtagctcctagagcagaggaccaagcatctctgaggacacacgttgtgcctggcattgagctggcctcacacaacacttgctctattaactattcaattattgggaccttactctctcatacttaccttttgtagaaaactaagaattagaaattacataagattggactcatttttcctcttctactaaattctcttctggcctccaattgcttccgaaggtggctcagttctccttacctctttcttaacatgttcttttgaaaatgacatttgacgtttttattaaaaactttatttgtgatattattgcagtatttgcaaggcttcagacaaatgtctaaactgtactatcgttctcagtactcttaagatgacatttttagtgtataacatatcttaaataacaaataataaatatatgacctatggatattaatatattttggtaggactggcagttacttataaattattctagttttgagataagaaaaaactccattttgctacagtatcagcataaattaacaaaccatacttttccatagagtagtttgctcatgatgttttggcatgtgtgggagtcacatcaactcgtctttcatccgtttaccaaatatttgctaataatacataccggctctaccactaggaagtgactgcttttttacactgagctaaaagacttcctaaagcagttgttcccaaactttgctgcacattgaaattacctgggatcttttaaaaacaattttttttcttttttttttgtggagatgcagtccctctctgttgcccagactagagtgcagtggcatgatcttggctcagtgcagcctccgtctccgcctcccgggttcaagtgattcttctacctcagcctcctgagtagctgggattacaggcgtgtgccacaatacccagctaatttttttgtatttttagtagaggtggtgtttcaccatgttggcgaggctggtcttgaactcctgaccttaagtatctaccctcctctgcctctcaaagtgctgggattacaggcatgagccactgtacctggccttaaaaatgttgatgccaggctctcataccctgtcagcctgacttaattgctattggatgtggactgggaagtaggattctttaaatttccgcagatgattctaatatgtagcaaagtttgggagaccactgtcctaatgggagagttgcttgtgtgctggagaagtgggatacaccattgttatcttcatgttgatagtgtcctgcttcatggggagcttttctctgaacgtcttttaaaaaataacctcgctgggcacagtggctcatgcctgtaatcccagcactttgggaggtcgaggtgggtggatcacctgaggtcaggagtttgagaccagcctggccaagatagtgaaaccctggctctaccaaaaatacaaaaattagctgggcatggtggcgggtgcctgtaatcccagctgcttgggaggctgaggcaggagactcacttgaacccgtggatgttgcagtgagccgagattgcgccacttcactctagcctgggtgacaagagcgaaatctgtctcaagaaaaaaacagaaaaaacaacaggccaggcgtggtggctcacgcccgtaatctcagcactttgggaggccgaggaggggggatcacaaggtcaggagatcgagaccatcctggctaacacggtgaaaccctgtctctactaaaaacacacacaaaaaattagccgggtatgggggggggcacctgtagtcccagctgcttgggaggctgaggcaggagaatggtgtgaacccgggaggtggagcttgcaatgagcggattgcgccactgcactccagcctggggacaagagtgagactctggaaacaaaaacaaaaaacccaaaatccctgcaacctaaatccaaacaaatcagcaaagtcccaaagaaaatagcagaacgttctttttgttccctcaatagcagaagacttatcgtagctaaaccctagttctaatcagaagccagtcagttaaccagtatttattagcatcacaggacatgcatagtcatgctctaggcctctgggatacgtgttcaacgttggttacataacaatccttgatttattagtggctgacaaaacaaaagatttgtaagtaattgaagtgtaccagatgatcaaaatgttgcaaatttgcaccgattaagagaatatgagtgcatgttgaaggattgggaagcatgtgatgttaattgaggactgtctttaggagtaggcttcctcagatttaaaggatgggaaagtatattttggcgtttagaggaaactcagcaaagatacagagaaagggtgactgagaaaagacaaacttggttgtgaaggaaacatggagaaacagtaaaagcaggcaatcaggcttatgcatttgattgtaaaggaactgggtgaatactagaaggtgatacgtagcaaagaaacaggcattcaaaaagtaaatatgaaaactaatattggtagtcatgcatgggatgccccagggttctgcttaggatgcagtatttataagcgaggtaactgattctggataataggtttggcagtggggtagatagtgcagatacagccgaatgattttgctgaagttgtaccagtcacatttagcagttggttgtatatagaggataggaattctgcaaggaattttaccttgaagtgttagtttgggtaatgaaggatgtcaaggaaattgagaggtccatgatctcataacgtatatcaggagcactaggggtgcttcttggaaattcagataactggtctcagtctacatctgttgaatcagaattgttgacgattgggtctctctgctttagacgatgagagatccaataggaatagtcaggtggagagaagaattttctgatcttctgcctttcggggacagaagatgccacaggggctttcctgagagagtagggtttatgaaggctctgggtcatggtgccatatagcatttgggataatgacagagagcatgtggatgtaaggcagaacttctatcctaaaatgtgaggttgagggaagaaataacaaaatggctaaatgtagtcatgtttcattgtgtcagaagccaaaagcagttacaatttcaaatgtgttttaggtgaatcccagacagactcagaagtgttcatggcagctcctgttcactcatcccaccgttttacctccagtccctcccacctgccgtctctgtgtgacatctggcttctggtgcccctgtagtcgtttattcctatgtgggaaaacattccccttattctcaagtagctttacaccacctttcctccactgtcttggtcttgctgaaaaccaacattactaacattactgtgcagccaccatgatttgtagctctctcatgatggagtcatctgctctgcccacatctctggaaaaagataatgggcttggccttctcccctgcccctcctgcacctcctgcacctccgacatctctcactcttgagctgagttctgcagggcaagaggaattgtccaggtttgcaaggatgtggggtgtcagaaggaaggaattttggcagaggggtgaacgagggtcaaagggtagatgatggaaacagtgtgatacatttgggacccgagggccatcaggcaagttaggaggagtggtaggaatggagagtgaagggagggagggaggcaggcactcagattactctgctgaagggttgccttgcctttgagtgataaggacctatcagggttaagttccaaagtggtgcaataagataagcatttggaaggattcttaacctctcagacccttagttcctttaaaaaaaaaaaaaagttggccgggcgcggtggctcacgcctgtaatcccagcactttgggaggccgaggcgggcggatcacgaggtcaggagatcgagaccatcccggctaaaacggtgaaaccccgtctctactaaaactacaaaaaatagccgggcgtagtggcgggcgcctgtagtcctagctacttgggaggctgaggcaggagaatggcgtgaacccgggaggcggagcttgcagtgagccgagatcccgccactgcactccagcctgggcgacagagcgagactccgtctcaaaaaaaaaaaaaaaaaaaattttattcatactacctcccacccagctttgtgaggattaaagagtgagtctttgcacatagtagatattcattaaatgcctatcttcatttccttcttcatccttctcctgatttgttttaatcttgaaatgtgcatgtgcctcatttggcagttatattgcctggtattttaagttatatttcctatgtttactttgtttctggaactttactgtttactcagagaaaatgtcttatttatcctttgcttgcctcttctcatttctaaatacaggcatgccttgcacacatagtaagcactcagtaagcatttgctttttgcttcagtattcagatttgactaaaattccatattggtaatattgtgtgtctcaacaatttctaaagttattggaagaatttatatgtggttggaattggtactttcacataacatgtaggattgtttttcattcctttatgaatttatgtcagcatctttctgaactgtgggtaatatattagacgtagaaaagtacatcatgttatgtgtgaaagagtcttatagtttcagagattggagtgtaattacatcatttctttgagtaagtacaaatgagccgccccccatgagcagtgcattgtctctttctgggcctgcatgacacctaggtgcatgtactgtatgatatgcaaaaacaaagtaacactcttttgcttaaaaacatcttttagttgctatttttaaaatagtcattaccatttaaaactaaatttggatgccacttttgtttatgaagtttctcttaaaaaatcttccatatgtggataatttgaatattcactttaattttctagagtatggcattaaaatgtcgatctaggcaagctgtcagttatcaaattcagcattgtaacaagctgtgaattcatgggatagaagtaggaagccacatacaagatttgacaatctttcatttgttgcatgtaaaagcaaatttatcttcctttgcaaagcaaagttttagatttttggaaaaccttaccgcttgaagattgctttgcctccagagcactttagaattgtatggggttctcaagatgggctctggtagaagattacaatgtataatttcagtattaatcttcaggggtatggaaaggaagatgtccagagtgaacctgaaacatattttaccaattgcgcattaattttaaattgccaagggcaatgaagaaaataaagaacagctgtcctcagaaaatttacagcaagtaaactagagtttctctctgtctctgttttaatcaaaatgggtgtgaggtgagcgtgggtggaaatagaggactgtcttctgtgggagggagttgaagagtcttgtggtgtctgcagaaatgcaaatgcaaaattgaaataataaatccaggcacatcaggactgaatattcattttcacaattagtaatcttatttgttttaaggaaactctgagaaactatttgtttccaaatgaatggtcacattaaattaataggggcacatccttcctctgagacggcgaaccccgagtccttgcctttacccctcgtccatgtggtttagggtttggtttaggactgttactactttcctgttgtccagtgactgttttttttcagcccatgaattaaaccttcttttctctttgttacctatggttttatacgttttcctcctctttaacgcatccacagaatagaaatgaagaaaattaataggactttattctatccttacaataaatcatcttgcttctgggtgtatttggggttggaggttgggtagttgtcagaaaatgacaatggtatattttcaagtagtgctgaaggtgtttttagaacagaagaaacttggtggaactgtcttgctacagagtaggcatgctaggctttgtttttgcattacattctgatgaggtctgtgacattttatggtacactgttagcatagtggtgaagaacattagcccaaaagactatcttgattgtaatctcagttttactccttattaactctgcctgtaacctctctgtgtctttatcatctgtgaaaagggataaggatcagatctccttcatggggttgttgtgagaactaaaagagaatgcttaggacattggcacctgttgaatagccagtaagtgtgagttgcttatttagagataaatccagtcattgaggccaattataattaagtagtctcattattgatttaaggctctaggagattgaagaactttctatttttttttttttaaaatagcaatttacattgggaaataaatcacccaaattcactttatctgttaattttatatggctcttagaacaaacagcaaaattaactggtttggcttttaacctcttcctcttcagtgatttgtggacatttgagcattaagatatcctgagcagtaaaatagccagaggctcaggaagaacaccacggttttcagattatctcaagcttttcctcagaagccaaacaaacaccacaaaacaccctgaaaaccaaaagcaggcattcttcctcctgggatttagtacctgctgctacagctgctctgaggtggagaggcagagggcagcagcgagacacaacattaggccttttctgatgtttcccatctctgcagcagaggaatgaaaaggaatcttgcaaaaagcaacggcccacttttgccttgagtttgagtctctttttgatttattgtagtaaaattttgctagtacttaaacctgagctacatgagtgatgagcttgaaaatttatttagctgtcccatcctttccagcttactttaatacttacctatgcctgggcacacacatgttagatggattttagttgtaattttggggtatttcttacagggaaggtattagaggaaaaaatactagaaatatggttcctgttcttaaagatgagcttcaatctaaattcaagacagagattttactctactttcatgttaaccagttatcctgcatagttccacggatactagtagaagacacaagactcctggatctttgacacaggacagtttattactgtcagtagctagagcagtgcattttgtgctcattccctgagccctgattcctcagggcactgcaaagatggccaggtgatacttatggatgatacagttggttgtgttataggaggaaaaactctgaatgcagaaaactcagatcttttataatggccagcaaggaagccttttgctctaggagacaccatctctatttgctaaggctgcaagcaaccctgctctttgctccagagggtagatattggaacagagggtgcttccaccatgctggggtggtgttggtagtggtgagtgggtggtatgatgtggggagatgtttgtgagcagttgtatccagagggtggcagatcccaggtgctgtgctgcattgtctgccttaactctttctgtaggctgtggtgagctattgacagatttggatgggagtgtgtcttgagatctttgacagagaatagaattggtgggaatagaatgggggtaagatggaaggcagggcggttgcttgaatttggggagtaattcagataagaaatgatggaggtttaaactagaatatttgcagtggaaagaagggatggataggaagagagacttcgcagacaaacagaatttgatgacctgctggatattggaagtcagggagaggggaaagtgaaaacgaactctaagcctcccagaccaggtggatgagacctttagccaaggcagaatgcaagatgagcagtaggtttgggagggatagagactggttttagatattctgaatgcaagtggcatgttataagaaatagaatgaaagcaagaggagagatggcaggaattatttttaaagaggtaaggttttgagtgtctaagtcaagatgatagtggagaaaaggacagaatctttgtgaatgcttctattttgatgatgagaggaagaagaataatggagacataagacagagggataggaggcgaaggaagaaggatggttgtaagggaatccataagaggggagattccaagaaggaagaagtcagctgtgccaaatactctagaaaggtcaggttggtggaggaacaagaaacaaccattgggtttagtggctggaaagtcaaactagataatagcgaggttgtacttgtttttttcttaggtgttattttctcataagaaccatgtgagacaggtggtattatccccattcgcatgagcccctgaagtgaagaaacgtgatttgatttgtctaagtctcagaggtagagagcagtatactacaacttgcttccaagactgtgttttaaatacccacgctcttaaccacagtgagcatgaggagatggagacactatagtctgacctttttttgaggatgttggagagatgaaggaaagaaaaacagaagacaagctgttaaataacaaagtttaaaagtttgagagtactgtaggaaagggaagttgggagggaagatttaagtatcacccactgaaagtgttcatctagattcaggattaagccattctaaagttagacctgccttttttccataacaactgcttcatggattctgaaggtgcatccttggcccaagagagatgcactgtctttgctgaggattgctgcaacacctcgtgaggtctcttcatagcaggcaagatgtcaatacagaatctgcatatgacaatatattaaaaattttaacgtattgcattttatgtttttggagtatatcacactctctcacacagtctccataaaactcggtagctgagcagatatatattaataggctcagttgcacatgtggtatcagaggccagaacaaggtaggataaacctgtcacaggtcacacaactaggcaaagctggggtttggagcctagtctcccgactctaagccagacttatcctatggcagcagaaacagggtgagaggaagagttggtggacagtgcaacttattggtgataggggagcttgatcctaagggaaggcgcagaggctgtgagatactccttttgccaaggttcatgctgtgaggaaaaactgaagggcacattgagtgagtcacagccagtgcctgtattagatactgggatcgggagacctctgggagagtgtggggccccaaaggttactaatgaaatcggaaactccctgttactccgtcgctttcctctaggccctgtctcggcactttgccagtagcttgggtagaaagaatagcaacaagtctagggcatctggtctgaagctaaaatgctttctcttgtgttgcctagaaactgaaaacgaggccagccacctgtagtatacagtccattttgaccataatacagaggttacagctagtaaactttctacctttcgtatttgagacttggattcgggaggatgagacttagcatcaagtcttaggtgtatctttagaagcctaaaattgtcagtacttccaaaaatacgggtttagacccagaagtgagtatttgctttgcactttttaaaatatttctcacttttctcctgggatgggacagtagtgagtggatgtgacagacaaccccagtgggcacagccacccttacgtgccaaactgtctggtttctgtgttgagtctctggtttgtttgggagtgggaagactgtgggaatgagatcctaagacctttcctgaaagtgcctgctggtggggaggctaatcatcacaatacagaaatgcgtttacacaaagagtaggagaaggcgaacatgccagtgaaagcaagacttatataggaaagggaaaaacagattagttggtggcaaataatagctgtctgtaatgtttttctatctgctgttcaaataattatcatccggggaagaacttacaaatgttattggtgagcaggaattgtatattttccatgagtcattctcgttaaataaattttgactctcttcccagcatgtgctttattttatgaaaatgggcttatagattaaaggccttggttaggacatttatatgtatcgtgcctggctattttgaaattaattttgagttttatactacaattaaagcttgtaatgattgcttggtatgtgtgaagctcatgcacttgctttgtaaacattatctcctttaatgttcacagcaacccagttcccatcattaaccccattttcagatgaagaagctgagcacagagaggctgaataacttgctaggtcacatagctagaaggtggcagagttggaagttttcaggatgtcagtaaccttaacttgtaataatttatattttgtaaccttaacacatttgtatttccaagatatgtttgttttttatttaaatggaggtaccaaggtccagaaagtttaaaatgttattcagtattatgttgaatctcatctttgtacagctctactttatctgctgcctcaatgcttaggaattatcccttaccctgctgcttggcagtatttaatgcactgtaagtgttacaaataatgcattcttttcccaaagctttagaattatgtaaataccgtatcttaaatttatgatggtgaatatgtccctttgatggaatagagagaatcattcttctgtctgcttatatttaaaaccattttaatataaatacacatttttgacagaatgttataatgttatgaattgctgagtatcttggaagagtatctttgtgtatgaacctgtttatttttatgtaacccagtgcagcagatagcctagaaagtgcttactatacttaaacagacatttaaacattagtgcttactgaggactagttataaatatatgtaaggaacacattatcacatttttgtaatccacctatgatctgaaacaatattcatgagtctcttcattgcttttcttaatattaccttcataatacatcattcttagccagattgctaggtatttcctcacaagtttttctaattatttcatgaagagtgcgtttttccttcattttcaagaatatttcaagattagctaatgttagtaattatatatgaaaatatatacatataaggcatctaaaataatgattaatatttttatgtgcataaaagcatgtttgtttgttgtataacccatagagaaatctgtctttacagtgctagagggatatgcaaacctatatttgcatttgtgcatacacatgtgtgtatatatatgcacatgtgcctcattaatgatgaaatgttagacttttgatgtaaatcctgtgaatgccagtatgaacattaatgaccttttgcccctgttgtcaacacacgtgagtgcaaataaatgattcagtccctccacaaatattgatgaagcatctcattccatgccaggcaatctgctggttactagatgagagctgaatgttagtttacagaaccatggaatttgagaatgtatttctgtagaatcatacggctgcaaaatcctttttaatcatttcatgcctgttaccatcaaaggtgtttatctttcactttgagcccttctcctttgttgttgtatcttttcctgtcatgtattttatttccgtatttcccttactgattaatcatcaatatattaattgttcatttatttttcaattcatttgttaaatgtataccataggctaaggacaagttgaggtattaagaatatggagctatcgggtataaaaactgcccctgaagctgaaaagataagaaagaacttcttggcctatttagtttcaagttactctcttttaattttaattgtctgtttaattttaccctgtgtcttcacttgattccacctcactgcctaaaatataagtactcaacaattcctgtgaaattaacaggaaattaaatgttatgtaatttctagcctatcttctcatttatttccaatttttcctcccttttattttgtattctccctgtttaccatttctattttttaaaaattacctgtcttttctcttctgcttcctttattctaatggtactttgttttcaaattcatcacatttatttgccagctgtagctactctagcctttatctctacctctcttgtttacctgcatttatcagccctcttaagttttatttttcttttgcatctgattttttaactatcccagaacatcttattttctgtgttgcttctccagcccacctacagggacagtggatgcctgctagtgctcagtagttccatgcaggtgttttctggagctgtgtggtctctggctctggtaacaccatttgggtttgagagggaaacagctgagcagagatgatgatgaaacttgactgcttcccactttttgaccctctcctctaggaagatgtgggtgatgtgagtagtgctctatgacagtgttgtgggagattggaggagacagatggtaggaagtaagacacatttgattttaccttatccattttgcccagagacagctgtcatcagctgctcatcactctaatggagataagcttaccttttgtttgctaactatcagaacgaatctcaatctaatttattaagagagaaaaaaaaaaaaacttggggcctgtaaacacattgaccaggttacaaatttttgttaaaagttagacaatattgatatcaatatcatcactgagcatttatatctgaaaaatcacaataatttggatattttaactttaatttttcagttctaaattgtgatgtccattttggcccaagtctatatctatagttctatatcaaattcaagtcagatcaacctagctatacctattctgtgcccacctattctatacaaggcaccataaaagctattaaaagcaaaaaccaaggttgaccaagtatctttccaggcaatacctctgtatttggagagaaggtggaatacaggttcacgattcttcatctgaaaattccaaggctaggtgtgttttggaattcagacctttttaattaaaaaagataatagatcattcagaacataggcacaggcaaagatttcatgacgaagatgccaaaagcaattgcaacaaaagcaaaaattgacaaatgggatcttattaaactaaagagcttctgcacagcaaaagaaactatcaccagagcaaacagacatcctacagaacgggagaaaatttttgcaatctatccatctgacaaaggtgtaatatccagaatctataaggaactttaaatgagaaaaacaacctcattgaaaagtgggcaaaggacatgaacagacacttctcaagacaagacatacatgtgaccaacaaacatatgaaaaaaaagttcaacatcattaatcattagagaaatgcaagtcaaaaccacaatgagataccatctcaagccagtcagaatggctattattaaaaagtcaaaaaacagatgctggtgagattgtggagaaaaaggaacacactatcggtgggagtgtgaattagttcagccattgtggaagacagtggcgattccttaaagacctagaggcagaaataccatttgacccagcaattccattactgggtatatacccaaaggaatgtaaattgttttattataaagacgcatgcatatgttcactacattacttttcacaattgcaaagacatggaatcaacccaaatgcccatcaatgatagactggataaagaaaatgccgtacatgtaatataccatggaatactatgcagccataaaaaggaatgagatcatgttctttgcagggacatggatggagctggagcccatttttcttagcaaagtaatgcagaaacagaaaaccaaatatctcatgttttcacttacaagtgggagctaaataataacacatggacacatggggggaacaacacacactgggacctgtcagaaggcgggggtgggaggagggagaggctcaggaagaatagctaatggatgctgggcttaatacctgagtaatgggatgatctgtgcagcaaaccactatggcacacgtttacttatgtaacctgtacatcctgcacatgtacctctgaacttaaaagttggagataaaaaatggaaaaaacaataaaaaggtaatatgggacatacactgaatagaatattacatctccaggcaggtttggtgtggaaattacttttaacatgtgaaatatgaacattcagtctgagtggaaaaaatacttaaataacctgatttcaggtcatgcatttatactttttcagcttcaggatttctttttgatttttaaaaattatttcaatctctctgttaaatttccccaataaatttctgaattgattttctgtattttcttgaagtttgttgagaaggaagctcatcttctttaaatttctttgagagattgcatgtcttcatcactttagggttggtctctggtgccttatattgcctgttaggtgaggccatatttccctgaatgttcttttaaaaattgtttatttttttagggacaaggttttgctatgttgcccaggatggagcccagagactattcacaggtgcagtcatagcacactatggccttgaactcctatactcaagcagtccttctccctcagcctcccaagtagctgggattacaggcactcgccactgtgccagtccctgaatgctctcgatgcttgtgacagtgtctgtgcattgagggattagctgtttattttcatctacccagtctggctttgtgcctgttcttcagagggccttccaggattctaagatgactgactcttgggtttcctgagcctgtgaccactgtagctgtctcagcactagaggatgctctaagcccaggcttgccacgagtctcttcaggactcagaagttgacgtggctttctgccccagatggacctggggaagacccaaaaaagatactgggactgtgtgggaatactggccaagacctgagtccagaagactgttctagtggcccagatggatgtgtctcccagcaggtctctgcatgggtgggatgaatttctgactatagcagaatgggctggagttgatatgaggccctcttggtatctgctgtggggcagaggctggagagccaggctctttgggtgtatgtctcatagtaggtctcaacatgagattgttccctgattgcagtgggaggggcgggagctgagcctgggtccccttaggatctgttgtggggcagaggttggcaagcccatctggaagcctcaggctcccaggctgcgagacatgggtgagtttccctctgggtccctgtgcaagcagctctgagttgggaccttggctgaggggccctggagccaagccacagggcaagtctcaggttcactgctgagaccactgttagtatgcagacgaacctttctgccaaagcaccagtgtgcaagattccttttggaccccttggcagatagtttcaactgcaggctcgaggccaaagagggctgtagctaagtcccttggaggactggaccattgtcaagcttgaatctaggagcaagcttgtggcacatcagccacctggatgttggtctgcactctcaaagtgaccctcccaggtcttgggctccaccaaggtttcacaaacttttacctgaatcctgagattcccacagagagactttgatggtggatggatgcagaattcttactgtcatatggggatatgagcaggttactttctgtgccaccatcttggtgatgccactcctctatccgttaacgcttttgattttgggagttgtgactaagattgtggacttgttttaagatgtaccctggtgggtgcagtggctcttgcctgtaatcccagcactttgggatgccctgaggcagtaggaccacttgcaccaggagtttgagaccagcccaggcaacatagtgagacccgctctctacaaaaaatagattcagcctagtgtggtagcatgtgcttgtagtcccagctagtcgaggggctgacatgggaggatggcttgatccaaggaggtcaaggctgcagagagctgttatcacaccactgcattccacctgggtgacagaatgagaccctgccttaaaaataaaaaattttaaatgtaatcaagtgttaaattaaaaggaatcaattatgagttatgtttagaagaagagagtatcactgtgggctggtgtcaaaaaggggatttttatccggttttgaaggtttagatgggaattttactcactgtcgaatcttgggcaaccagaatagcacctggcacatatctgatgaataaatatatgacagttgaataaatctgtgaagagaaggggaagagcattcctgctggggagacttcagcctgaatgtagccgcagaggatgcaatgaacttggttatttgtgggtgatggtcgagccgtctgttgtgattaagttgaatacactgcagtccctgtaggaagatgaggtgaggcccgtcatggatgtgtgcgtgtgtgtgccttacatacttgttaaggctagaggatgtgggctggatctgaaggctggctcttaaatggggatccaggggacattagataataatagtggtttgaaaataaaaagatagaagacagtgttcagaatggattatagttgtgtgtttctttttagggattccgtaataaatgtgtgtgcatgaaattcaggactgtgttgaagaggcagacattagtctgaagtttgaagaaagagtggacattgacttgttgcatttggaaagtgacagggaagaagtcaaagatttcaaatttctaatacttgttgatcagaaatagtgatccctttggttgacagggaaatttggaaaagaagctggaaaaggacatcataaactcactaatatgccttggcatattggttggtttatatccttaagatgtatttgatgccttttatatgaacatatatgtgttcatagataaaaagtatgttccagctctcatttagttcagagcctttgagaacagtgtagcaagaaatagaaaatcgaacaagacttgagtgtatgtattttacgtgagatttccaagctgcttttgtgcaaggtttatttaaatttcatttaaaaatgtagaaactgtgttgagtagctttaattcccccttgcacctctcagtatgcattagcaattacttctctcaggttgatgaatttgaacttgatcaattatttgatagtaattactggcacagagtgattattattgccgaagtgacattcttatttcatctctccatataattcaggccgttttcacagaggcatgtttgcttgaatgcagagtatgatttgctcttttggcttctaccactgaggtcaaactttttaagctttcttagctagagtagtactgaaaccctctggtattttaaactatctggatgtgcccttctggcttccaaaaagaaggaaggattgaggctcaatcttttttcctgtatcgggctcaaaaggtctctgatttttgtgtttcttagcaactttcttttcttttttccaactcctggcagggctgtgcggcctccttttcctctctttttttttttttttttttttttgagacggagtcttgctctgtcgcccaggccggactgcggactgcagtggcgcaatctcggctcactgcaagctccgcttcccgggttcacgccattctcctgcctcagcctcccgagtagctgggactacaggcgcccgccaccgtgcccggctaatttttttgtatttttagtagagacggggtttcaccttgttagccaggatggtctcgatctcctgacctcatgatccacccgcctcggcctcccaaagtgctgggattacaggcgtgagccaccgcgcccggcccttttcctctcttatagttgctgaatgttcgccctcaggaaggtgtgtctctgatgctgtgactccttagtgttctgagtagacttaggtagactaagggctagcctttgctcttctggttctttaagctctaatgagatggagagtaattattagcttgcttgggctgccataataaagtatcacaggctgggtgacttaaatcaggggtccccaatccccagaccatggcctattaggaaccaggcctcacagcaggcggtgagcagtgggcaagccttatggcctcagctccgcctcctgtcagatcagtggcgacagtagattgttataggagtgcaaaccctattgtgaactgcacatgtgagtgatctaggttttgtactccttatgagaatctaataataaatgtaatgctcttgaatcattctgaaaccatcccccccaccccaatcggtggaaaaattgtcttccatgaaaccagcccctggtgccaaaaaggttggggacgggggctgctgaataaacaatagaaatcaattttctcacaattctgggggctacaagtccaatattaagctatcagcagggttaatttcttctgaggcctctctctggcatggggatagctgtcttctccctgtgtcttctcatggtccccctctgtacatgtctgtgtcttcatctcttcttacaaggcctccagtcatggtggatttgtgcccaccctggtgacctcattttaatttaattactttttttttcaagaccttatttctaaatacagtcacatttggaagtactgaggattaggacgtcaacagatgaatttgtggggatacaattcagcctataacagaaggaaaaataggacatttgtaaaacttaaaaaataaggaataaaaagcaaagaggatttatattcctttgggtatatacccagtaatataaatcgtcctgttatacacacacatgcacatgtatattcattgcagccctactcacaatagcaaagacatggactcagcctaaatgcccatcagtgatagactggataaagaaaatgtggggtcaggcgtattggctcatgcctgtaatcccagcactttgggaggcggaggcaggcggatcacctgaggtcagaagttcaagatgagcctgaccaacatggtgaaaccccatctctactaaaaatacaaaattagctgggtgtggtggcatatgcctgtaatcccagctacttgggaggctgagacaggagaatcacttgaacctgtgaggtggaggttgcagtgagccgagattgctccattgtactccagcctgggcaacaagagtgaaactccatctccaaaagaaacaaaatgtggtacataaagtaccacggactactatgcagccctaaaaaggaacgaggatcatgtcctttgctgggacatggatggaagtggaggccattatccttagcaaagtaatgcaggaatagaaaaccaaacactgcatgttctcacttataagtgggagctaaatgatgagaactcgtggacacatagaggagaacaacacatactgaggcctatgggagggtggagggtgggaaaagggaggggatcaggaagaataattaatgagtactaggcttagtacctgggtgatgaaatagtctgtacaacaaatgccatgacacaggtttattatctatgtaacaaacctgtacatgtacccctgaacttaaaagttaaaaaaaatagtatatgtaactataatttttaaaaaaagcaaagagaaaaagaaggaacaaaacttgacaaggaagaatgaatgcttttgtgtgtgtgctgtgagttacaatctgtaggacatgtgttagtatcatctcatttccctcccagcataacatagggtataggatgcagtccttgatctcagatacagcatagagactccgagaggtttcctctcttcctcatgagtgactgaactgacttgaatccaattctttagactctgactagtattcttttcatcactccgagcagggaggtgaaaagaaagtaaaccctcgtggtcaaattccatggccttttgttgtgttattctgttttggaaactttggggattagaggcatcatctgcctgtcagccagttgtgttcttgttacctttaacattcgtagcggagaaaataaacacacagccagaaagctgcaactcatttgagaagtaaatataagtcacattttttggaagtcattattatgaaaattttcaagcataaaaaagtagagagattggtataatgaattcccatattctcatccagattcaataattatcaagattttgccacagttgtttcatctatccctttttccctcttaaagcaaatgtaaggttacttttaaccctttcaggatgcaactttaaacaaatggagattttcttacccttaatgctactcagtttgctaattgcatcaaaaatgtcttttcgtcattgatttgttcagatcagaatgcaaatgataaggatatttgttcagcataccaaattaggtttgacaatacattttcttttatatgtctcttgttttcagggacaatttgttttcagatctctgtagagagagaggatgcattgatttggttcattttgcagtatactttgtggtgatattgatttgaagtttcacagctcctcactggacaggacatgtaacaactttaaaaaaaattacagttttgctttagttttgaatgaatttctatggttttcaaaaatcatccaaacaatgatttctatgtactaatcatcaccgtatttttaaaaggctaaaacttttgaagaaaaatgtaaacaagtaaatacagtaaacataaaagttttagtgcatctttacaaattggattggtattcatttcaatgtatccatgatacttaactaacttactaacattgaggcatttcatttttgtccacatggaacattgtttgctgagattatttttttaaccacaacttacagataaaaagctagtaaaacaagttgttaaacacttgattttttcaaaggttatttttatagttaacaggaatgctgctaatgttagttagcaaagattttgaatgcaactgtttgatggcttttaaaatatgatagtcttctattttgctaatagtttgtttcttcccataggtataaatgaccaaggattgtacagagttgtgggggtgagttcaaaggtccagagacttctgagtatgttgatgggtatgcctcttttctaatcatttttccatgtgttatttgtgtatgttcattgacttcacagcttaatatttcataataatgtagagaatacttgtcattccattcctctactttctacaggagttttctgctgagcagagacaattgacccacagaagtagattagtatttgcatcagcatagattgtctattacctcttattaagaaatgaaaaaagaatgcaccccctggttgactatcttcctgtgcttgcttctcacagggaagtggcagtcaggcctctatgatttgcgtggcttccaaatagcctgtccagaattgtgacagtacatttggttggacaagaccactgggactcgctcatttttatggagcttccaaaactgtcatttgacagcaagggtctgattctcagggattcattggtattcacagtggcttgtttgtagttcacaccaggctctcctccagaaccatgcatgctccatctgtgctgataacacagtgttctttggcatcgcagactagaggaagccagaaagtgaattcatttcattaccccagacattatgtgaatgacaaagcgcttttacattacacactgctgtcagttcattgccacctgtaagacactccacttctcccccaccccaaaacaggctgcctcttgaagagtgatgataactcatcaggctagagggcctgtgtatcaaaccaatctgtcattatgatcttgctacatattaatttatttgataccttactttaattaatcaatattaacagtgccctcaggtgtgctgtgaatgcattccaacctgtctgcatcttaaaacattacagcaaagagtcatttttaggaagcatgagccaagttgaataaaatcaactgccatgctacagataggattgcttgtttgcctatatttgaattaaggatttaataagcaacaatcttttataagctattaaccacaggagaaattgcccgtcatcagttggagagccttattagaatacattcacttccataagctgttttcattttctgcctctctggtttaacttgggtgtgcaattttggcagtcagattttcctttttaccaatagtggtctccaaattaaatagactcaggttgccagtggttcagtagcagctggaagaatttaatgggagtacagcatctgcttttacttaattttaaaattggaatcacttctttcatttccaagatggtgttatgatgattagaactggaagagtatattgataacagaatgggaaatgtggactgaaaggcacattttgctggtaaattggtcctaaggacctggcattatttttattatcatcttgttcctgttcaaggaaagtttgaacaagggtttttctgtggtcaccttgaagtgctaagctgtctcaaaatttgttggtcatctcataaaattctacgtgtacagcattgctaaactcagcgtggtagtttgctctgctcatgggaaatgtcccaagccagtccttaacttacaaggtgtttttaaatatctaaaccctcaaaaaattcgtgacctggaaaactgtttttacttttcatgggcctcagagtagagaagcccaggacatgagtgtgacacaacctcacacatattgctggcaagggaaatgcttatgttttcagtaataccattctgcaatcagaggaaagttagagaattgatgtgagacagatactgacttgttacctcctcattaagccattcatttaagagggttacacaatatacatttgttttgagtaatctataaataattcctagtgtgaatttaagattatcagtcaaaaactttggattttcattagcattaataccattttcttattaccttatgctaccaatacaaaccttagcccttgacaaaatatatttatttgctatttcctaatcacttaaatgtttccttatttctttccttttattctgatggagtggacttgtctcttttttctggtgtgttttttcccttcatattgaacactgattgagtgttcaaatggaaataatttaacgcctcttccaaaaaaagggttttagagttttgaatagtcatgtctacataatcttaggggcatttttttctccaacttttcccattttgctcattgttagagggttacatgtatatcctgaagaggaaaaaattgtgtgggtctgccaagtttttaactttgcttttttaaagcaattagtgtttattattattcctgcaggtaataggtttatttcaaatttgaattttttcaaggaacattttgtttgtaatgcattgtctttgtagaaatgggaaataatttaatttttaagtatttgagaaacagtcccaagccatgtactattttttgaggagagctgccatttatccaattctctgtagttcttgagagctaattatttactttagaattttttattgccatttttacacaaagtactttgtattgtttgttaaagtgttttaagtcttatttaaatactcatgtaaaagtttataatgatttctaaaagggtatatgcttaatctcttgcatgttttttcacttgtctcttttttctggtatgttttttcccttcatatttcatattaaaatagcaaaatgtttctttccactatccttctctccgtcctccttctcctgcccctttgttccctccttatcctctttattctctcccccttctttccttctcccctaattcccagctggcatgaaatagcaatgacattgaccatagaaaactgtctaaatagagaggcagttattctcctcgaggccaggtaaaggagcaggcagctgccttcctccatccggtgatgagagggtattcttagttgtcttcccctctgggagcctaaggcagctatccgctggatttccagcagcctctaagcctttccctggaccaagcttcttaagctgctgaaagaacatgcccatataagcagatgcctgcctttttcttcccctttgcagcctctaagacagggcgcacagatttggtagaagttgttattgtttttgtaaagtagaaacttagcacagtttggaaaggcagggagaaatatcagatgagttgtctttaggtgagtcatggttttttagtaaatggagtgagaatgtaaaatatcaattacaatagttcatggtagattagaactgatacgaggtagaattgttatacattcttccttcttccctactttagtttaaaacatcagagtggaagaagaggaaattgtgagaaaatgtggtagtagtttgtgtggtctggtgagctcagtggttaattctaaatctgatttgcaagaagggctggatgaccttattttcacacataaaaccacagaaaacaagaaatgagaagagttttacttgaaaaccattaccttgtttcctttgtaggacagctttgttgcatagattggggaaaaaagtgaactaacgtagctgaaaagtataaaacatattttcaaaattcatccattcactgtgctttttcaagtactttaaaattggacctaagtcagtgttgagtagggtgctagcagctgcataaaattgcactttgcatttaggttggactgcagattttcagtttcaaaaaaatgaccagtggttacgtaagcgtgaaacattcacccaaataaaaagtcaactctttttatctgtgcttgttagtttagatttttaacaaacccgtaaagtgtccttccttggtcagaaaggaagcaaattgtttttatctttcttatggtagaacatgtattctgaatgaaccctccaaatgtattttcacatttgaatcccaaataattattaaattctgcctagtcccagtgcattcactgattctaaaggactgctagggatgattgagctatttgaaaacagtgaaaatttaagagagaattagtaacatagacactgtgtagtcatttgcttctgatgtgacagctgctttttattccatgaatttagaatgatggcttatttttccatagacagaatatgattctcaaaatacggaatcataatttggtagaaagctggaaataaaagatttcctttagaagcctcttggattttaaaaaggtggtttgctggtagcaagttgattgaaaatgttatctgacttgtatgttaaaacgagatttaaataattgatttaatgagagagagaatattcagttactgaagtaattggttggcaaagtctttagaacagaattatttagtcctagttataaaggattgcacctttaatcagggggcttaatttgatttcttgaatgtatctgtggcttgtctgacaagctcagtaacaaatgagttcagaattgtaggaactgatcaaaatgtaatcagtgtcaattgccattgttgtagtttattgcatattgctgtcagttgctgtaatcaagaaatgttgaagtgctttaaaagtcttcagacctttgagtaattgacctcatatgtatgatgctatgcctgtgaaataaccatcacttcctgttttactttatcttcagaaagtttcagcccaacattgagttgtcatccacccttcatcatcccaagcctaaaactttttaagtagcatgcacgacttaatgtggtggtcccattttgacaggtttttctttttagtgtttttaaaaaggaaatgctaacaagatgttgccttctctatgaagacaaatacagtataagggagggaaaaaaccctgaaacaacgaggttttttttggtcttagttaagacatcatcgtggagtgagggagaaatagtcttttccatgaacctcttactttctcctttgcatagtaggtgtgtagaaaaccaggcaaattgatattgatggctcaatatcattcgtcgtaacccatttcctgcctcctccctttgggtaggtaccatcactgcttgcttatacttttcagtgactcagcagtggcaataacctgctacgtttaattatttatggaaatctgtatacgttcttcatttgccttgatgctctcaatcgttctgtgagagcatttacattatctccattgtgcagatgaagatctgaagttcagataggtttgcaactcgcttgtggtggtatggctgggccaggttgttagaggcgtgtaagcccagctttgtgatacccatgctgcattcctccctgccgccatgccacagctgagtgtaccagcccagagttctaagagtcaaagaagccatcatactccttaggggtttgcctttcctgccatcctttcattttatttctaccagaattgacactttccattccacaatttactaactctcccatctccttttttttttcctggtgccatataccttttctttagaacttactagccgttttgaattttcttcttttactttataaagaagcaaccctattaactgacttaccatttgaaaggatgtttgtaagaaacacataattacacgctatatggataaagaaaactagtttaagttagaatgaatgtctagagtgttgaacagaggcttccaataaatatttcccggatgactatattatagtgttaatgtgaaaggttaactgtaaatgactttttaagtctctgtgtagttattttctgttttggttgatcatatgttaatttcagaaagatagtctaatgaacagaaatcctgaaaatctgagaccaagtttatcatcctttcaccagtttgttgccattctgatagtcatttggccattcatggtgccaccctcggttttctgtgtcatgatgatgcaggatttttttgctccttggttcagctaaatccgtgtttttgtgtcatcaccaggaaaaattagacatgcggacacagtgaagggtgaggagagtggaacttattaagcttaaggggagtgctcagcaaagagagggggtcccaccagcgggctcccacctctcatattgaacgcaaggccaccacacatgaattgaagaggtctggctcctcctttgcataaggcgggaattcccagtagctccaccctgttcccccagtgcgcgtgtgggcccttagtctaagccactccacattgatttatttccctttctaagcatgtgttaaaagaccgaaatttttaccgtgggcatgtataggcaagccttatgtgcacaatgacctgggtggatcggaggttctctggggactctaccctacttagttggctgtctcctgcctctatcaatacacagtatgagggcaacaatgccacctaaaacacctcaaaccatgtgcatacaactgaaagtgccgcttgctataagccaaggctactgagtgatactgttaacgatgatgatgataatagctatacatgaattacattgtggatgttgaaataatatactatgtctaattcttccttactcccaacccatctcttattttttgctttgatctctactacagattttacgaagtgccagaagtgtctagtcatagaacatagcttatagtattttagagaaatcatatatataatgttttcctaggaaactgcaggattgtggtttgcccatttaaaaatggaagctttgtgagctagacaagaggacctttgatgatcaaggttttaattatttttttcttgtttgcttgctcactagatgtaaaaacatgcaatgaggtggacctggagaattctgcagattgggaagtgaagacaataacaagtgccttgaaacagtatttgaggtaagctcctctcagtagcaagaaagaagaatggactatttggatctgtaacataaaacagatgccaattgtgtacataaatatcaatagttaaattaagccttattttaaaaagggaaaatttatcaggtgtctcagtgtcccagaaagaaaggtaactagtagatgcacatcagtaattaagtaaattgcaacagaacagaaattgacatagacttgggttttgaaatagacattttttgtggatgtacattttaggaattaaacactatgaaacaactcgtcgaggctgatgattgaatgaaggctatttattgaattcattgtgtctttatattttatgctgaaatgattttttaaagtttaaatgatttgaacttaggcttatgacaacatgtcaatgcaaagctctttgaaaaagaagtttacttggtgaggttttaagataaagttgttttctatttataatagaaaacatttaggactagagttagagggtagcatttttttatgagtcactgtcttttttttttttttttttttaaagaaaagaacttaatgataagctcagggttagatgaagaacaagtatatagacagttaaaagaaaatgaaaaaagatcacaactgtagtttttttatatgctgtggttctgttgggaacttagattttccatggcaaacgaatggcctaggaccagttctttttttttttaagatgaagtctcgctctttttgcccacgctggagtgcagtggcacgatcttggctcactgcaacctctgcctcccaggttcaatcaattctcatgtctcagcctcctgagtagctgggattacaggcttgcaccaccacgcctggctaagttttgtaattttagtagaggtggggtttcgccatgttgaccaggctggtctcaaactcctgacctcaagtgatctgcctcctttggcctcccaaagtcctgggattacaggtgtgagccaccatacctggcctcaggaccagttctttttaaccatacatagggttgtttttcaggtaaaagttatttgggttccagtggatacattcgaatcaacttatatgacgtattttgtatttttaaaaaattatgaaaaatttcagatacataagatgagagtttagtgtaatgaaccctcatggctctattatcctgcttcttgagttatcaacattccatccttcttaattcattaatcttcctacctgccactgtttttttttttttttgagacagagtcttgctgttggcccgggctggagtgcgatggcacaatcttggctcactgcaacctccgcctcccgggttccagcaattctcctgcctcagcctcctgagtagctgagattacaggcactcgccaccatgtccggctaattttttggtatttttaagtagagacagggtttcgctgtgttggccaggctggtctcctgacctcaggtgatctatccgccttagcctcccaaagtgctgggatctacctgccactttttaaagataatactttaaagattttctgaaacatcatattactgtacccataaatacttcagtatttatctcaaaaagtcatttttaaaaagtcagtcaaaatataattattatgcacaacaaaattaatatccagcattcagtccatgttcaatttttaccaactgtcttcaaaaagtcttttcatatttggtttaaatcctgcaggatttaaactgtgccaacttttcacttggttgataggttttaaggctattttaatctctacatttcctcccttcctccaccactggcatttatttgttgatgaacctgggtcatttttgattatatcttcatgataacatttaacatgtttctttagccatgctgtgtcctgtagataaagatttttcaaatgggctttgttagagtcaggttttattttctttatttcaagaatgcattgtaggccgggcgcggtggctcacgcctgtaatctcagcactttgggaggccgaggcaggcagatcacaagatcaggagatcaagaccatccttgctaacacggtgaaaccccgtctctactaaaaaatacaagaaaaaaaaaaaaattagccggcatggtggtgggcgcctgtagtcccagctactcgggaggctgaggcaggagaagggtgggaacccaggaggcggagcttgcagtgagccaagatccagccactgcactccagcctaggagacagagcgagactctgtctcaaaaaaaaaaaaacaaaaaaacccccaaaaaacagaatccattgtagtggtggtatattctttctgttgtttcccatcaggtagcctgggttgtctggttgtcccactttttaatgatataaaatttatccgtgggtgatagttatgtattacctattttcaagtgctttgtgtaaagaagatgttttcagccactgttctaaattttttctgaaactgttatgtgcactattgttattcctgattgataaagggatgtatacttatatcagtattgccactgatagtgactaactgtggtttagatgaggattatggtaaaaatgaatcttgttactcccaactctaggataagaatttaagttccctgaagataggcatcttttaagtcttgttcactgcagtatccccagcaacttggagctgtggctgagaaattagaacagtgtttctcaactgaggatggttttgtccctcagtgggatgtttggccatgtttggagacattactgattttcaccattgctggtttgcagtgctcctggcatctggtggcatctgacatcctgcagtacataggacagcccaccctcccccccacaaataattatttgattcaaaatgtcaataattctgagatttagaaagctgtgttagacacatgaaggaaagagtaggtaagggatataaacatataatgaattgcacatattaacttgaccaagagacgtactgccactctaggagatagctttaaatccattttactgtttagtagactcatagctagtgcaggtaaagggattgactgagatgactcagttattggtggaaaactaagggtggaaatccacctttttggcaataaattgcattctttttttcctccattccgtatggttcttttcttttgctgtgtgggaggaatttgtttaataaactagaggccctttttatttagtacataggatttctttttggatcttgatattctcggaagctggttccttattgcccctggtcttgtgttgctttttctgtctttttattttattaccttgcttcatcctatggaatttcacttttaaacaaacattgcctacagaacgacattatgaaatgttattattatataacttcacttctaacaaaatacacattctgcctgaatgtgataaagtgaattatcataagatggcagatgccttgggagatttgaaagttgggttgctgttcttttcccctatgttatttttagcgatggaaaatgcagtaattaggatttaattgacccttttttttctctaaattttggtgatgcatcaaatgggataaaactgggtttttatctacctccattttggcagcagggttctggcccaagcaagtgtatttctttctgcatgagaggtaatacagtgtgatggtcaagagcaggaggtctggagccagcctgcctgccagggttggagccccagctctgtcactcatggcaccatggcgtgaagctgaatatagcttttctcacccaaaaaagctcttgcccttgaattcttctcactgcaaataacccagctatcttattggatgggatgttggaggtggagggaggaaaacagccaaagccccaaagcaccaaactaaaacaagaagcaggtcctccagggtcttggagaaggaaaagtatgtgcagtggaccgatgtgtggcatccctctttttcttctactgacgaggcaatttttttttttaacttctcatgttttagagagctgaataccagccctctgaatgatttcttatctatgcagaccattatttcgattttcagagatgtgttcattacagcagttttctgttgtgaggggacaaatgagtggttttgtgatgtttctagtcaaatgattttacctggaggaaacttcttttaagcctggaaattgtaatgggactttttgggagggaaatgccagcttaggtaaatattatgatttatatcccccaacagatcccaacgagtggcaaagagaggtggctcaaaaacatgtcgggtgggaggctgagagttgcagtgactcagcataatacattctgtatggggaacttgtcatttttatggctgcttccctaatgttaacaatatttatttttttatgctgcattgcctagctagacatatggcaatgatataagtaacttgtagaagatattcagatacaaattcatttttattggaaaagaaatgtatttctaaggtttctcattccccccctccctcgaccccacttttctttttagcaccctttaactttccttctctgctagataaccatttttcttctttgttacctcctgcttgtctatattttgaaacaaaccccctaaagacttacttctgattggcccttctttctccttatttaggctgtggtatagttgattttttttttttttcattttctttgtgaaatgggaatgtagggggaaaaggagagggaggggaaataagagcaggactttttcactcatgcattaaattttagtttatggttgtcattttgtgtttgtatgtatatactatagcatcgtaaattgtatgtaaggaatatatgtaccttaacatttttttcttttatttttcaattttcttttcaaaacattaaaaaaaaatagaaacagggtctcactttgttccctaggctggtcttaaactcgtcgtctcaagtgatcctcccaccttggcctcccaaagcactggggttacaggtgtgagctaccatgcttgacctatttttatttgttgtttaaagacagctttattgaaacatagttgacatacaataagctgcatatatttatagtgtacgtttcggtaagtttgatatatgtatacctctgaaactatcaccataatcaagatagtgaccctgtgcattattaccccccaaagtttcctcctaccatttgaaatctctctcacaccctacggaagtagcctcatccactaaaatgttactttgcaattcctgtaattttatataaatagaattatatagtatatacttgaagtctgtattatttcacttagaatagattcttctatgttgtagcacataccaacagttcattccatctcactgctaactaatggaccattttatagatacaccagcattttaaaaaatcagttcatctgttgcaggatatttaacttgcttgtaactttcggctgttgcacataaagctgctaaaagcatttgtatacctatatttgagtggacgcaggctttcatttctcttggataaatcccaggagtggaatatttagatcatgtggtaattatgcttaactttttgggaaactgacaaactttcttcccaagttgatgtatttctttacatcctcaccaacaatatacaaaagttccatttccttttcattcttgccaactcttaagctggtcaatctttttcattttagccatcctaataggtatttggtagtgtttcattgtgcttttagtttgcacttctctaatgactagtaatgttgaacttttttccatgtgcttattttccatttatatattttcttgggtgaagtgtctgtgcatatctttttcccaattttttacaacttagattgtcatattattatgttttaaaagttaaaaaatatattttgagtacaagtcctttcttagatacctgctttacaagtattttcttcattctgtgacttgtctttttgttctctcaatagtgtctttcaaagagaagttttaattttgatgaagtctagttcatcagtttttctttttatggactgtgcttttgtggctatattaagaaacctttgcacttattcagggtcacaaaggttttctttttttgttttcttctgtaagttttatagttttaggttttacacttagttctgtgatccattttgagttaatttttacataagatatgaggtatgaattcaagttcatttttgcatagggatctccagtagttctagtacgatttgtaggagtggctatttctcctaaattgtctattgatatgatcatacagttttcttttcatttggtgaagtacattgattttttttttagatattatgctagtattgtattcctgtgataaacccaacttatgatatattattttatttatcttgtggaatttgatttagtaacattttatttagaatagttgcatctatgttcgtgagtgatattggtctgtagtcttctcataatgcctttctcataatgtctttaactttgatattaggataaagcttacctcacagaatgagttagaaattattccctcttctattttatggaagaatttgtatagaatcagtagtttttctttcttaattgtttggtagaattcattcagtgacatcatctggccctagagttttcttactggcaagatttttaaccacaaattcaataggactactcaggttatctgtttcttcttgagcgaactttggtagtctgtgtcttttcagacatttgtccatttcatctgagttgttgaatttatgggcataaaattgctcatagtatttctttattttatttttaatatctttagaatctgcactgattctgcagtcacctttctcattcctggtgttgtttgttttctctcttttatttcctaatcattctggctggattgatcaattttactgattatcttaaaagatatggttttggattaatttattttctttatttttctgttttcgatttaattgatttctgcttgatttttattatttctcttcttttgcttactttgggcttaatttacacttcttttttttcctcatagctcattaaggtacaaaatgaagtgcttggtttaccacccttcttcttttttaatataggtgtttagtagcataaaatgtcatcttagtactgctttaccaacatccctcaaattctgatatgttgtgtttttatttcgttcttttcagaatactttctaacttctctttgagttttccagatatctttctgttattgatttttaattcagtttttgttgtaatcaaaaaacaaactctgtgtgtcttaaaccctttttattttttgagatttgtatcatggcccagaatatggttaatcttggaaaataaatggcctgtatgcgctgggaatgtgtgttctgcttttgagtggagtgtcatttaggtgaaggacatgccagttggattaagttggttgatatttttgttcaaatcttctgtatcctgatttttctacttgttctgttactgaaacagagaggtgtttaactctctgattatagttgtggatttgcccatttctccttgtagttctgtcaatttttgcttcaagtgttttggggctctcttattagatctgttaacatttaatattgttttggcttcatgatgagttgacacttttgtcaatatgaaatgaccttctttatctctggcaatattctcggctttgcatatgttaaaaaattttgtttgtgcatctttgattttttttttaaacatttgaagcagaatttctgagttacaggattgtaaccttttaaaagttcttaatatcttgcgagattaccctccagaaaggctgtacagaccgacacttgtctaggtattctttaagtgtttataaagctagttgctctgatcttttataattttaagatatgtagcaaggtggactgaactgtagcatttctgttgatcacaggataaaataaactaccttatgtaacttgttttgtagactctgaaaatgctgtgtatatttttaaagttgtcatcaattttatttcatctctcatcttataggaataaagataaattcttatttttataatatatttaatcagagaggatttgagtttgtttaatcttttctatgtattttgtgtggaatcttcagctaatatcttagagatgaagtttcaaaattgtttgcttacatttggttagatggtatgtttggctttaaatacattaatgtgtagaaggaagttttatatataaaaccagatgttcacaaagctactttccgtgattagatatgaaatactgtatgcttaggtctagtagggatttgtggctccctaggctttgatagtgcttggtgccaacagcagttaataaagtgatccgtttatgtatcttttttgatatgtaaaggtattccctagggaagttttacacattaattaagaaatgcataacaaatttaacatcctttcataaaaaaactcagaagtgacttgtttggatttatttgataattctgagctgttcttttcacacaggagtcttccagagcctctcatgacctatgagttacatggagatttcattgttccagccagtaagtattatgtaaaggtatataggaacagttttgtagttggtagtgagcataaacgaaaaatttccatatgaaaaattcaacttgttattgcagtttgtgttaaaaatagaaatcgctttaaatgatgtttggtgcctcccctcatccttgggaggtgaataaaagggacagtatattctttcatttattcacatacattaattatttcctattatgttactggatatgtaaagccaagacaggattcttgtcccatgagacaattctatagcaagtactggggcatacttctcattatactacaaaatgtacaataatggcatgagcaaaatgctgagggaacacagaagtatttaatttgcgaaaggttgtggagatgaacagatttggagagattagtagtttggaggtggcttcacatagacagatactcggatctaaattacagacagaaggaatattatgagataatgccagaactccaaacagtatttgatacagactgaataatatacaatcaaatgttaaatgaaaaaggcctatagttggtagaattttgtgattgaattttttgtgagtcatactcatttgaggctttgttttctgttatatggctcactttctatctttgacacgtgttgtttaatcatcatagtcttctgaagtacactggtgttaggtatttaatagtgaaggaaatgaaggttgagacatgttaagtaacttgccagattatagggagccttatttaaaattcagaaccctagttctactagctaaaacctgcagtattggttttcacaggtgcactgacagtagctgtaattgtattttcatttccttttattttctcctcttggatgtattccatagtttaatctgttgaaaaacttagagcattccctttgggaccaatgttaccgctgcctgaacattgctttaaatgttaccttcttgtgaggtccttgctccagccagtgtaaaggttcctcctgtgttgcaggaaggaggagtgtgtaggccccattagactctacatataaaagaggcttttggaaaagcaaaaactggttctattcgtttttgttttcacatggggagaggattttttaaaaaagagaatttgtgagatcaagggagtgggggaaaattttttcggcaaaaactcaagtaaatgcttagttgttttgatttcttccctgtggcatttttggcaaactggggaaagagaaattaaacttagttggaggacaattgtttcatgttgtttgccttagagactggaaaaagcagaagagtgccaattttaatctagaatcctttgagaattagagaaagataaagtgattatggaataaggtttttttttttcctttttttttttcttttattattatactttaagttttagggtacatgtgcacattgtgcaggttagttacatatgttttaaatgaccacaatcattagtattattacgccccataactgatggcagtgtttttgaaatttgaatatcagtgtgttttaccaaatgaagaggttcctaagaggtaggagcttatatcttaagaggtaataaaatctatggtggtagaaaataagtttaaagagtttgttgaaggcatctttgagcagagtggtgaaaacgattgcagaaacgcagacaagatcatcacctgttggaccagtaccttgtgttttgcttcctgactttgtgggaatgctgtgatagtcttcacagtgatttggatgacaggaccgtcagaaagaaatactgtttctactgtaatcattggcatggatttgcacctaagtgccgttgtggttggaatgggacctgtagtaacttgatttaatgagaaaaagtacatgtactaaatgggtgtattttaggggccaaggtttccaatgtagactttaagtttttattttaatctcttgagtacccttctctgcactcattgcctcttttagagagtgtgggaacagatctcctaatcttttgcatatggacttttaaggatcgaataaaatagttacagaaatcaggtggccaaaattagtctccccttttgaatgctgttggaaaatcgggattgtggttaagctgtcattttccgtgaacagtgacacagcttacctggttttgctcaagtgtctgttagctgagctgactgctaaaattactaagcatcagcagtctttgttaccacctctcacaccaacttgaaaactaatttttgattcttctcagtcatgtgcagtggtttccatctgttctgtggtgatgagatagtttcttctcttctaccctccctgctgagagttctcaaggtttctcctgggtcccattgttttctctcatcagtttctttcctgtagtttcctgttgtgaacctccgtgttaatttctagggttcatgatacaaatataaatttcatttctattttgtcaccacaaaaggcacatttgttttatgttccttgttctgaaaaaaagatcaacttacttttaaaggttgactgcattggaaaagttaaaacatttttttctttgagaaaattaagagagttaatgtaactttctccgttagctgaattccaaactaaacttataaaaggaacccagtagacgatccatcttgggggagactataatggacttttgacatggaaatttataagacgaaaatgtagttacctggtctatggggaatacaaaagattgtgtccaccacaggcaggcatctagctggatgtcttactgcgtgatgtctgttacctttgagaaagttgtaggctatgatctgtgtgtcagccttttggcctcaaagtccttgctgtatcattttgataagagtggactcatgcctcagggttggagtcatggtgcttagtacgagaatgacaactaaaggctgaatgcctgttgtatcagaagaaaaatctcttcactgtcagttaaaccaaaacacttgtgttgctatgttcagtgtatttcttcctgtagtcaagttagttgggaagcaaaatgattaccacaaaggtctttggttatttatcatgagaaacataactataatcggatccaagacattggtgtttacctaaccagaatgttctatcgtttttgataaacatatctgggaagcaagacaaaaatcatgtgattcttgctggggaagggcttaggaacccaggaattaagggaactgaatgcttagtggcatgcctccctcttagcttgatgtattcatttcacggtagatacgaatgccacaggagaaatgcaacacttgatgtctgttgactgaagccctttatcccttgggaagtgcttggatggttactgctaatgcctttctaaaattacagtatcattgacttttgacatttcaatattgaaataatttagcatttatctgcctctgtgtcttcgataagctccatgatcacatctttttcagtttctgttagttggcacagcatcataagcagatggacattacagtgtggtagatgctgatttgtagttacacaattaaaatgccttttccactacagtaagctcctaattccctggcatatttcaagaatttggtattatgattaatttagtatcctagtttttttttttaaggtaggctgttcattctttgtcaatcagtagcaattaaaataaattgcattagcataagcaactttagatgatttatcttcaaaaactttttttggagtaccttaaaggtattatgttgtagctacatagaaatgattgcgaatagaaagctctgatgattaatgtcaaaacaagatagagaaaaaaatggttttatttaaaaagcccagagtatttttttttttgtttttgaagaagagggaaaaagacttggcagaaatggatgtgtgattttaaaatagattaggatgggctagcaggagagagactgaagatagtgaaaggttttgactctatttttctttttttaaattttttaaaattatactctaagttctagagtacatgtgtacaacgtgcagatttgttacgtatgtatacatgtgccatgttggtgtgctgcatccattaactcgtcatttacattaggtatatctcctaatgctatccctccccgctccccccaccccacgacaggcccaggtgtgtgatgttccccttcctgtgtccaagtgttctcattgttcaattcccacctatgagtgagaacatgcggtgtttggttttctgtccttgcgataggttgctgagaatgatggtttccagcttcatccatgtccctacaaaggacatgaacgcatcctttttaatggttgcatagtatttcatggtgtgtatgtgccacatattcttaatccaggttttgactctatttttcaaaatcaattccactattttaagaaatgaagaatgtaattcatagagtgtgggaaactgtttctctagcttctgtttctaaataatgaatcctaaagtatttaaactaggttttcactggaaaaagatgattattaatggcaagatagactcacaagttagtaggtttttagtgcaaagttttccagactttttaatttttgcgatataaaattcttatcctcagtagttgtccttttactcctttggaatttctactattttgcagagtctctgctttaagtctatttttaaaaatcaaagctgtgaattgaaattgttatattgtttttattttctctagtgttgattagtatcttgttttttataccagattaagaactggattataatttattacctaaccctttagacagttgtgtttttgtttctggtgataaatttagtttgtatctagaagtttttttaatgatataatatgatttggttgtgttatttatgtgccttttaatttcttagcctttttgcatcctttctgtttagcaacagctgtcttagtgtcctcagttgtaaaatatcatttctcattctcaaatactattattaggggtgtaaactggaacaaacttgtctttacaaacattggaaacaatctaagtgttcataaaatcgatggtaaggtgttccatttaatgacactgaaaaatatctgtgatacattaaataaaataggttgtttaggcatttcattaccaaaaaaaggaaggaaaactctgcaggatttatacttaaaatttaccagtttattttaggatgagatttattatgggtagctttaagtgaactttttgttgaaatataacatgggctcaaataagtatacagcttaatgaattttcacatgtaatcagccccagatcaagcaatcaaacatcatcagaagccctttctcttgctcatgtggtcattatccactcccatgaagtgtgatcactctcctgacattgtaggttgaggctgcagcatttggactttatgtaaatggaatcagagtatattcttctgtatctggtttcttttgctcattttgtgagattcatctctgttgtatgaaacattcattcattttcattgcattctgtttgaagaagccacaatagatttatctgttctactgttaatggacatttgggttgtttccagttttgggctaatagaacgctgctgtgagtataggagtatgtgtcttttaatgagcatttatgtgcatttttcctggttatatacctacgagtggaatttttgggtcggtcatagggtatgtgtttgttcagctttagtagataactgccaaacagttcttcagagtggttgaaccctttaatgattaccatctagttagcatgtggaagtttcagttgcctcatgtccttgccaaagcttagtattcatttaaagccattctggcaggtgagtattactctttcattgtgttgttaacttctgtttcaccgatataggtttattctgttttcataggttttttggtcactggaataaatattttgtgaaattcctgccccggtcttttgcccttttgtctgttggattgtctcttttttccctgattggtttgtagttctttctaatctgattgcatgctgtttcttatgtatatatgtatttcagatatttagtactttgtactaaggtcattttctctgtgttgtccaagattttagtattacaggtatttaacttttgtcataaggaaaactattatccttttgaaaaaataaatgcccctttcttgatctgctttacctctctttcccattctcttgtttttttttgctttctgaacaggtgttctgaaatcccactcttctccccttctccagcagcttcctctttgtttaacctcctcattttagtagaaaggggctctcagttgataaaactggtgatacccagggccccttaatcccagtgtttccattccttgacctctccttacctctcgagtccactggctgtgcccagcctttgcagatttcttctcacttgccttcctgatgacatcgtacctccctggtcctcccacctcttcctcctccttggctgcattgcctgcttgacttagcccttgacttcacatctccctgtacatctttggagcccttttccccacagtgccctcagttagctttctgtagaagttcggcagctttgtccatgagctagtggtcacacctcctggagaacatttctagccttgatctctaaagcctcctactgtttccagctactgctaaataccagccatttgaatgtcacttcctccattccctccaccatcatctccttcctcaagacagctttggctgctgtgtttctgtctgttggtggaattggccctgttgccagactacccagatgtgaaacactgctcgtctctgccttcttccttctgacccactgctagtctgctgctaaaacctgtcagttctgcttcttccatcgtagcgctcaaataataatagtaacacgaacaacaacagtactaatggctaacagtgattgagtgcccacatgtgccagccacagaggctaagtgctttatgtatgttacagcattgaatctcataatggccttttaagatattgtttcattttgcagatgagggagctgaggcacagagaggttagttaggtaatttgttcaagaccactcagctatcagttagaagcaacgactcccaggtgtagtgacggtcctgacatacaatcttttgactttatgaggggcttattaggatgtccccccatcataaatcatagggcatctatatttctttgttctacttccctctttgtagttctaccacctacctcactccctttatttttatttttttgagatggagtctctctctgttgcccaggctggagtgcagtggtgctgcaacctccgcctcctgggttcaggcacttttcccacctcagtctcctgggtagctgggattacaggtgcacaccaccacactggctaatttttgtatttttagtagagatggtctcactatgttggccatgctggtcttgaactcctgacctcaagggatctgcctgcctcggcctcccaaagtgctgggattataggcatgagccactgtgcctggccaccactcctttcatttcttttttcttatctcccacataactttttcctcctaattagttctttttcctattctaatccatcctttaagaaaaatatcaggcataccttccccaaatataactctattcatatcgctttcttgctttgttttcacttgactaatttagaagccaacagtgagacaacttcttcaaactggcctttgcagaccagagttggcctcgggctacctttctatctataccctcgaagagctgtctctgcacaggctctgtgctttttgtcatgctatttactgaatttggaatgttccccttgcccctcagtcctgcctttccttgaacccttccccgttcttcaggacccaatctccaagggctctccattatgagacccttcctgagcttccctggccagccctaagtgaaactacaaaaccgtttctaaccttcttttctgtcagcagtaaatttagaacctaattctcttttgtcacttctttgacgcctgtgaaaactagcaaaatcttcaacaacaaacattttattgatttatttgatagttttccaatcaagaacacaataaagggaattggggtacactgttaataagagccacgtataataattccaaagtttgggggttaagggattgtgttttccagggctgttggaacaaagtacttactactaaccaagtggcttcaaagaagaggcatttattccgtcacaattctagagtctggaggtctgaaatcaagacgttgggagggccgtgctccctctgaagactgtaggagggatccctccttgccactcacagcttctggtggttgctggccgtccttagtatcccttggcttgtgggtccttcattccagcctctgctgtgacaggacaacctccgctgtgctgcctgtacacggtcactatccctctctttgttttcttgtaaggatgccagtcatattggatgaagaagccccaccctacttcagttatgatctcatctaaactgacatctgcaacagctctcttcccaaataagatcgtgtattaagcacgcctttttattctgatgttttgacatctggggcctcactgacccgaggaaactgcccctcccagggctggcccattcctggagatattaaacttctgcaggcttttcacatggaactctccaatccaaagccccgtgacccccctccctacgagcctcctctgcgggcccttacgctacaggctgtactctcctgcccttgtcacttcagttccgagtatcagcaactagggacagcccttgtgctgcagtgcccactgaaataatttaaaccagccggtcctcaacctgcgcaccctgccttgcccattccttcctgcagaaactacagtagaggctttgcccgcattccccgttcttcctctgcctcttgatcgacgctggtgcttccccacgtggctgtgcacaacatgccatgccttctgtttctagggctctgtgagtctaaacttttcccttcctgacagtcattttcatgcatgccttagcatacctgatgtcattaaatcccaagtacagtttaaaacagccacactgcgagttctaagggctagaacttcaacatattttttgagggggttatcctgttcaacctgtaacatgcaatagcctatttgctgatattttacttgcattccattgtggcgtgacccagtgactagaccccatcgagtaaacgatgaacagacatgaaacacagcatgtcagaaggagaagcttagcagctgtccgttctgtaatataaaccaaggaaaaggcaccgattgcagccacactgaaattacctcattaggggaggcatgagaagattcatcataaggagaaagatttttttttccttttaacggtggcaaaatatgtttacattctccatgtttgataatcttgaacagaggagctgttgtcattgtcttgggaaatatatttgattctgagttctctattaactattgttttctttttctttatttttttctttattattattttttttttggaagaaagcggcagcccagaatctcgtgttaatgcgatccatttcttggtacacaaactgccagagaagaataaagagatgttggatattttggtgaaacacttaacaaagtaagcctctttttcttcgttttaactttcttcactttgctctaggtgctgggtagtgctctgggatttgtgacgggtggaactggggaccacacctggaagggcaggctgaacgtttgactcattgtgtgtgttttggataagactgttgaaatatgctttcatgaagctgtataattatttgcttaacatctctgccagcaactcagggtttgatttgaagtgaaagaagagaatattatacattaccctatacacagattctggaagtgtgaatataagtttgttagaatatttagcttggtttcacacctacctacctctaaatttgaacatgtcctttaagttggcttaattcaataatgggtagttattttatagatttcattcccttttcctcctccttttaaaaaccggcaaaatcaaatcagtggagaaattagccctttctttaagtatagagatcattctaactgtagaattttagacgtgaaaggaagctgaagaacgctatattttagaacctttcttttacatataaagaaaatgaaggtcagaagatactgtgatttgccaagggacctactgctagtttagccatttattcatttggtcaacaaatatttagtgaatgcctttcttaggtgctagtggatacatagttgaataaaatagtctaagtcccagctttcatgaagcttactttctaagggaaaatatgaaaaacagattacaaataaaaatataaaacagcttcagatgataaatagcaaaaacacaaagcagagtaaggggacagaatatattgagtgtgagactataaaaaatgttatgcaaaggctttttgaagatggtatctttgaattgagacctgaattaagttgcagggctgctgagaacagttgtctatgtgattcactgcacagtgatactgggctgaaagagtgattgtgggtgctctgaccaaagtctgcatgcttttacaaaggtgctacgcagtctagtattccttggaagcaaaagtataatattctggggaaagagtgagttttctaagaagaggggaacagtaaactaaggcttttgggggaagcaagattagcacatacagttggctctttgtgagtcctgcatgggcagattcaaccagctactgatcaaaaatccagtattccctgtggacatgagggttgacttttctttatccatgggtttcctgggttgactttagaacttgcacatctgcagactttggtgtctgtagggattctggcatcaattcccaggggatactgagggccaactgtgcatggaattattaagaaagccattgtggttagactagagcaccaaagagagggaagtaaaggagtaggcaggagcatctgcatggagggtttctcagatctggttatttcagaggtagatgttgagggtggttaagtctcttgaccccttgcttttaaggaaatacagagttgcagactatttacagtccacaatttttgctcctttggttaaacagattcctccccccttaccaatttcagtgtttcaaatcactccaagcagaacctgatgactgtggcaaacttaggagtggtgtttggaccaactctgatgaggccacaggaagaaactgtcgctgccctcatggacttgaagtttcagaatattgttgtggaaatcttaattgaaaaccatgaaaaggtaaaattttttttttctttaagagactttgttttcggcttgtcgccatgtactacacaacgatcctcttagatttcccttttctctctctctgtttaaaaaaattctttcattctcactgtgatgagcttggttctaagaagttctcattgagcttctgtcttctgatggagttccataaatctgaaatttatctggtcttttgttatctccctggtttaatgaagaagcatttaatccagatgtaagtgaatatcaaggcaattgtgaactatttaggacttttgttgcttttattcccatctttggatttctcactcaaattctgtgtggcacagcaaccctgtactcttgataaagttagggctttgcaacttacaagagaaaataaggcaaataaggttgaagggatgtgagatggggccagaggaccatgagcatcattgagagtaggggttgaggggcagtgaagccagcccctgctctgcacctgggaaaccgcctgccttgcaaagagtctttctggttacacctagctgttgtgaatgacaagtaaaggaggagaaattggggaagggtaaactcttcaaatatgcttaggcattgcatctggggagcagggaagggtaaatattcctggggtgtggtggatggggttgacccaggtgatccatgttggggtgagcagaaactgctttaatatactcttccctcccaccatacccactcagcatattaactactagaaataagtactgtttatgattgtcactttgggatcactttcccaaattactgttattttctccttgattagatattgtctatggctactcttacgatacaacagaagagtctggtacttgcaacagagaccagatagcccgcaaggcataactatgtactgcctgggggatctgcaaggcttttctgtaaaggaccaatctagagcaataattttcaaccccaacaaatcagaatcacctgagggcctcttgtaagtggctgcatagccatgcgtattctgttaaatttttgccttcccaagaattatgataagtagccagcaagaagaactgctaatctagggaggaaacgtctcttctttattaagaacttaggagaggacttcagtctggaacacgaaaagaaggtttcattaatatttgagagggttttgttcataagagttaaaacaagacctgagtatggcatttgttggtgttagagctggcccatggcagtttgtgtttgaattgagaattgcaaggagctggtgtctattcagtttagctgggcttcatttatatgtagggatgagataatctatgggggaacataaggaaaaaatggttttaggatgctttcggagtgctgttctcaataggaccaccttgagggcctgcctctctcccgctgtctcaagccccctcaaagtaaagcttccacttattaagaaaaatgctgctgactcatagttaaaagtgtacctttatttttataaggatgtaaatacagtttttaaaaacacttattctttagggcagtacttttcaatcttcttgggatcacaggctgctgagaagctgacagaagttattaccccttttgttagtaacccagataaatgcacataaatccttctttccccttaattgttctaacagtttcagtgggctcacctgcattcctgaatctgtggactgtaggttaagtatttctggtttaaaatgaataatctcttaagtgacttgctttcttacttgtttctctgtaatcaagggaaaacatgattttaaataccacattattttctttcaagaacttttagatttttttttcttcagtcacctgtagatgagcactttgctaataacattcctgacttctgcctctaagatggggagcttgaaaactgttagaatgcttggtcactcatttgtttattaaaaagatttttttaaattgagattgcatcatatgccagacatgtagtaggtgccggatgtgcagatgaatattccagctcctgtgggaaagcaggtcgtcatctgggggcggaagccatgttttgggactcggatcctataaacgtaccccagtctaatatgttacataacttattttcttgtctgtttctctctgctaagatccttgaggccagagatctttttgtccacttatagtaatacctggtacatattaggtgttaatacttatggagtgaaataatgaattcaatacattttgagggggttgaaggactgggaaagagacaggcaaacagaaatgtagtccctttggggaaggcatagcaagagtatttcttgggtacttgttgcattggctgtttgctggagcagttctagcttgttgctaatgttgggttctcatggaaaagataagcttgaaagctgattggggattttctttaccattatggtaaaagcagcttgtttatggatgtgagaagttttgttttgcctttttttttttttttttttttgccagtggtggtgaatttatgcctccttttatgatcctgtcaaactgtcattaagcctcattagtgtgcactaagccatccagacagctcatggaaagatggctactgttcatttttagaaagaaaaataattagactacaagctttgagacaatgttacagtagctcaacaatcatttgattaaatcctaattaggaaacctttatgcaatttatttgtgaaaatactggctctgggtcttgctcttggataaaaggatctccatttcatgctgcaactgcctgttttcttccctttttgaagctggggagataagtacatgatttgtctgctgggaagtagatagtgctgctttcaccttgttaataaatcttacaggaattttccagtagcgtcggcaagcctgttacaatagttacagcagacgaaagtggcctcgctttcagagctttatagagctaagcagaggtctttcggttttccttctcttcctttctgtggctagatagttctatgaatgcacaaccaacgttaattaagtgctctcaggctttctattcagaagggagcaatggacatcgagtttcagattcttcactgtgtgcttgggtttagggttggaagcagggttgtgtggcagggttggagggttggagatgggggatgtcagtttggattagttaacagttctgagaacctaaatttccccattacctcgccttgtctctcccatttcatctttgaacacttctactcccactcctggctctttgttcctgctcagttggacttcactgcagagtccaggctctgctatgaggaagaatatttttgctgacaagggtgcttgtgcaggaaaacttcatatggatgcgtggatctatgttagccacgggtttccctggcagctgacctaagtatacccttcagaggatcctaacatttgactgtagagtggggagggaaggatctagtccctcttagtgtttcaggacaagatgaaaacgagagagggagtaaggacaggaaaagttgaaaagagtagtctgagaaaggaaaacattacagtaatggatggcggtggggggagggtgcaaaaaaggaaggttaaactggggaggaaaggaagaggcctatgtgtgtcactgacagtggctctgacaggcgaaaaatggcgagaaggaagtcattttcttttcctcagttatttgtttttcctccctaagaatgtgaaaaatgttgactccaggaaagtcactaaagcaaagaggaaacttcaacatgtaattaaagcaagattgctctagatgaatttcggagttagaaaaaggctcctagttaatctgctttggagatgacaatttttcctagcctccttgctgtttttataaatctgtgtatactttataggaaacttaatccatatgttttagctttatttacacataataaagatgtagactgagcatggtggctcatgcctgtaatctcagcacttcgggaggccaaggcgggcagatcacctgaggtcaggagttcgagaccagcctggccaacatggcaaaaccccatctctacttaaaagaaagtacaagaattagccaggcgtggtggcgggcacctgtaatcccagctattcaggaggctgaggcagaagaattgcttgaacccaggaggtggaggttgcagtgagctgagattgcgccactgcacaccagcctgggtgacaagagcgagactctgtctcaaaaaaaaaaaaaaaaaaaaaagagttcctgggccaaaatattattaaggtctttcttcctttgttaacgagaaaattttatttcccaggtggcaaagggtgctgtgaacttttcaaggattttcaaattggggttgtgccttaggatttgtgagttttgcataagttctgttcttaacagagtatacttgttatgcattaatttggtgcattttttcccccagtgcctgctgtgagtcattcatggtgtgagatttgggggaagtaaagacagtccagtaggggaaagaagaaatgtccaaaagtagctacaagatatggcagagaataagcgctttgagagagagacagagagagaatgagcgagaaagtggcggagacttcagaggagagtttatgttcagctgcagggaatctggaaagtttccccagtaagtgttttgaatcagttttataatggagtttgaacaggtggagatgttttaagaggacatttcgggtatgggagaccatgtaatcagagaaacacagagaggaggtacgtgttctgggaatgcagctcttgttggaacatgggcaaatggcaggagatgagattggaaagagattcgggccaggtgtgggaggttgagaatgccgctttaggacttttgcatttacttttataggtactggggccactcatagttttcaagtaaactgcttcacaaaacttaatctgacagcaggatttgcagtaggaagtagaggaatgaaaggctaggagagaggttatttggcatagtcgaagggcatgggagtgagaatggggagttccagggtggacagcatcatttggtgaggtggaataggcaaaacccggggactgggtttgtaaggggtcttggggaaggtgtgatagagattcaatcctgggacaatatgggtgtcactaataaaaggaaggaacaaaggggtttgggggaggagtaagatgagttcagtttgtcacatggtgaattgtagttatctgttcaagataagtccattagacagagatttggtgctcaaacttatgagtgaatttaggggtagaaagtataacgtaaggtatagttaaagacatgagattggcgtaagaaaatatttattggatgctcatgatgttacatgctttgggtctactataaagggtattaatgtaattctagtgtatgaggatgcttctttgtgtatccatacacttaaaaatatatatataaaacataaaattcccattgcataaatatatgtaatagtatccctgtatgggtgaaaattcttatgtatattatctctttatacatctgagagaagtgaggggtgagagcttaacttgctcatgagcacacagctagtaaaagtgaagtgcttgggtttgaactgagattgacccccaaagcctttgcttttcatcactaggagaagacagtaatatccttgagaaacaccaagattttcctgttaggggtaatagaggagccagaagaaacccaggcaggatcaggtcagtgctagtgtcagggttgtctagggccttgtcaaggatgccagatacgtcccatgagatgggcaagtatgaggacaggctagtgatgtgagctcatgaaccagtggcatgagtgagctctttcaacagtgacatttcttttttttttttgagacggagtttcatgcttgttgcccaggctggagtgcagtggcatggtcttggctcactgcaatctctgcctaccgggtccaagtgattctcctgcctcagcctcccaagtagctgggattacaggcatgtgccaccatgcctggctaattttgtattttttagtagagatggggtttcttcatgttggccaggctggtttcgaactcctgatctcaagtgatccaccggccttggtttcctaaagtgctgggattacaggcatgagccaccgtgactggcctaatggtgacatttctgttgagagccagagtgtggatcaacttgtaagatgtatgtgaatgagtgtttcggaatgagtgatattcagtgtcaatttttttttgttgtttttgtcatatgacaagaataaagcaggaggaaaagccagaatagacatggaggggaaggacagagcaggaccactagtgcctgagttttacatggctcactggtcaccctcagagtctagtgacctgttagcttatgtctgaggtagggagttctttagaggaacttaaacagggaatgaaccctctcaggagtcactgagtctgtgtagattgagtctattatttatttttaattttcgtgggtacatagttggtgtatgtatttatggggtacatgagatattttgatagaggcatgccatgggtaataatcacagcaggggaaatggagtctccaccacctcaagcatttatccattctttgtgttacaagcaatccagttatactcttttagttatttttaaatgtgtaagaaattattgttgacttcagtcatcctgttgtgctatcaaatactgaattttattctatctaactgtatttttgtgcccattaaccatccctgctccccccgccactgctcactaccctccccagcctctggtaaccatcattctgttctctatcttcatgagttaaattgtttcagttttttgctcccacaaataagggagaacatgtaaaatttgtctttctatgcctgacttatttcacttaacataattaccttcagttccatccatgccattgtaaatgacaggatctcattcttttttaaggctgaatagtactccactgtgtataagtatcacattttctttatccatttgtctgttgatagacacttaggatgcttccaaatcttgatgattgtgaatagtgctgcagtaatcatgggagtgcagatatctctttgatatactgatttcctttcttttgggtatacacctagcagtgggattgctggatcatatggtagctctatttttagttttttgaggaacctccaaagtattctccataggggtacattcccaccaagagtgtacaggggttctcttttctctacatccttgccaacattttttattgcctgacttttggataaaagccattttaactggggtgagatgacatctcattgtagttttgcttttcatttctctgatgattagtggtgttgtgaacattttcatatacctcattcttatattttatacattataatgtaataaaaacttttgtttgtaatttgactccctcctcatctccccccacttcctaagggcccttgaagattctgaagagcctgtgaaaagcatcaaagatcatattaatcagggtggttttcttttaatatctgtcttaatactgaaaaattggcaatttataaagtaaggaatataatgttactctcagaattacttaatataagaatacaattcagattacattgatcttattgagggttttaattggattttcaatgagatatgtaaaatgtgctttggttgaccttagctttgtgtggtacttcagtgtgctctgatgtttcattgatttcctgatgatcaggaggttttttcctagtactagcctgtattagtctgttttcaggctgctgataaagacatacccaagactgggaaatttacaaatgaaagaggtttaatgggctcatggttccacagggctggggaggcctcacaatcatggcggaaggggaaaggcatatcttacatggcagcagacaagagaacttgtgcagggaaactcccctttataaaaccatcagatctcatgagacttactatcatgagaatagcacaggaaagacccacccccatgattcaattatctcccactgggtccctcccacaacatgtgggaatatgggagctacaattcaagatgagatttgggtggggacacagccaaaccatatcatagcctttatgtattacagtttttgtggatgactttgtgccaagggacaattacatttcatgtacattaaacatttcctggacaaggattctttataactttgtaataagcattttagcctttgtaatagggattgtggtagaatgtgtcttttttttggtgtgacagtggaggccattgtggtggtcttgctttgttgaaatggctgatggccttgtactgcccagaggtgtcttcatggcactttgatttatccttgtttgtaacatgtgcttcaaagtccccgagtagtgtgtgtcctccagtcacggaggagcctagacagagcagtagggagaagggcatatgtgtttcccatatgtcttagtctgtattgtgttgctataacaatacttgagactgggtaattttgaaggaacagagatttcatttcttacagttgcataagctggaaagcccaaggttgatgagctgcatctgccaagggccttcttgatgcatcatctcatggcagaaggacaagagaacatgtgaaaaaggagtgacagacagagtgcatgtgcaagtgagtgagggccaaacttgcttttctaacgaactctcttgattacaaacctatgcctgagataacatgaatccatttgtgagggcagggacctcatgacctaatgacctcttaaagctcacatctctcaacactattacattgaggattatgttttcaacatatgaactctgagggatgcagtcagaccatagcagtgtccaatgtaatcaccagaataatgttacgtgcacatatagaggagtatcacactgtgttgtttcactcttgttaaccctgcaaccaactttatgacctgcatctacctctctttgccacgatcagtagaatgcattggtgctcctaggttcattggtgtaattggattcccattcagtctcaacttgctgctgtcccagtgacagccacatgtgggctgtttttgatgaggagtatccactgcttcattcctgtggctacaaacacaatatatgtcctatccctcttccgtaggttggtctctgtcattctttaatatataaagagattgagtgagtaatatccaaaccattttccatcaagtgcaagagtcttccagtcttacagcatgcttgccatttaatgggaaaaagaaatctctttaaaaaacatctagccaaaaatgcttcttgatttagctttgctggcactgggttgctaggcagcactagtttttatgtgagagaaaaataaatgtcttaaacaacaacaacaatagcagcagcaataataaagctgcaaagtttctaaaagctttgtgtctgcctgagtattgactgttcagtgtagaagtcaaaatcccatagcaagaatatttgacaaattttcagactcccccccatccccagttttcatgaatgttgacttgtttggcattgctatgaaaactttactgttttgtgtgtggtttttttttttttttcttcttctcagcagggctttgcattttctggagtgtttaaaaagagactttaaaagcacaggaaactttctgtcttcctttctctttcctttaaggagagaaggaaaataataatgacattgtcttccttattctgtttttctttagctgtggcattggaagcttctgctgtcatgtggctctgtaaatggtagattgtattttcccttgggaccagagtggtttgataagagcaaatttaggagagagtcattctgcatcattttagtgcccagtatagacaaagcactggggaaaattgaagggctccaatataaagtgtgcatagatttattctgtgttgtctgagaaagcatactgagtacaagtgagcagtacttgccatgaggtgagtttttgattcactagaaagaagaacttcgtaatatttataataatgagaacatgttcatgttagggatgggattgaggtggaagaaagcaggcctctgaggtcctgcccactctgaaattttctgcccaagcatctggagatgcggagctgcaaagagagctcctcggagcctagcttagtgtttagaacttggcattcaatcagtatttgcagaataaaaaatgatgatgaagaatatcaccctattcttcattgcatttttaggttgtttatattcccaggaacaacaagactacttggaagggaagataggaaggaaagaatgagagggcgagtgtggtggcgtatgtgtaggtcggctccagggaaggcaccatcaggtgccttttcttgaggggagagggtagtttgggtatatatgggcttggttttttgccttgagctagtgctcactatgtattttttctttgtaaaataaagcttttagagctgtcttttttgtatctctcaagataaaattgggagcaataataattataatagctaacactgattgaaagatgattgtgtgccaggcactaggctgggctccttatatgacatttaattggacattccatagacagtttagtataatatggcatagtaggctctaaagtggaattcctggagttgaaatctcagctccactcaattgtgtgactttttttttccattttattttagatttgggggtacatgtacaggtttgttacagggatatattacatggtgttgaagttggagctttgatcctgtcacccatatggtgaacatagtactcaacaggaagtttttccaccctttctctctctctccccctccccctccccttttggagtctccagtgtctattactttcatctttatatctgtgtaaacccaagatttagcttccacttataattgaaaacatgtagtagttcgttttctgtttctccattagttcacttaggataacagcttttagctgcatccatgttgctgcaaaggacgtgattttggttttttaactttgttgctgcatagtattccgtggtgtatatgtaccacattttctttatccactccactattgatgggcactctattgattccatgtctttgttattgtgaataatgctgcgattaacatacaagtactgcatgtgtcttttgggtggaatgatttattcatttattttttttggatatatacccagtaaggtattgctgggtcgaatggtagttctatttttagttctttgagaaatgtccaactgctttccacaggggctgagctaatttgcattcccaccaacagtgtataagcattccctttttttcccacaacctcactagcaccttattttttgactttttaaataatcgccattctgactggtgtgagatggtgatatggtttggctctgtgtccccactcaaatctcatgttgaattgtaattcccagtgttgagggagggacttagtgggaggtgattggataatgggggtggattttccccatgctgttcctgtgatagtgagtttttctcagatctgatggtttaaaagtgtgtggcacttccccccttgcttgctcactctctcctgctccgccacagtaaggtgtgcttgcttttccttcgccttccaccatgattgtaattttcctgaggcctcccagccatgcttcatgtacagcctgtggaactgtgagtcaattaagccccttttcttcataaattacccagtctcaggtagttctttatagcagtgtgagaatggcctaatacagatggtatctcattgtggtttcaatttgcatttctctgaagattaatgatgttgaacaattttttcatatgttttttggccatttgtccgtcttcttttgagatgtgtctgttcatgtctcttgcccactttttaatggggctgttttttcttaattattcatttcagttccttatagattctggaaattagttctttgtcagatgcatagtttgcagatattttctcccgttttgtagattgtctgtttcctctgttgagagtttcttttgctgtgcagaagccctttagattaagtcccgtttgtctgtttttgattttgttgcatttgcttttggggtcttcataaattttttgcctaggcgactatctggaagagtatttcctaggttttcttctagaatttttagagtttgaagtcttacattcaagtcttgactccatctttagttaatttattgtatatgatgagaggtagtagtctagtttcattctgctgcatagagttagccagttttctcagcaccatttattgaataggaagtcctttcccccttgttttttgtcagctgtgtcaaaggtgacttggttgtaggtgtacggctttatttcaggggtctgtgttctgttccattggtctatatatcctatttttgtgcccatactatgctgttttggttattgtagccttgtagtattgtttgaagccggctttgttccttttgcttaggattgccttgactgttgaggctttttttttcattccatgtgaattttagaaaagtgttttctaattctctgaaaaatgacattggcaatttgatagaagtaatgctgaatctgtggattgctttgggcggtatggagattttaatgatactgattcttccaacccatgagcatggaatgcttttccatttatttgtattgtctgtgatatctttcagcagtgttttgtagttcttctcacggacatcattcactttcttggttaaatatatgcctgggtttttgtgtaggtgtgtggctattgtaaatgggattgcattcttgatttacttctcagctcagatgttactgatataaagaaatgttgatttttatctgttgactttgcatcctgtatcctgaaactctgctgaagttgttaatcagatctagtagtcttttggcagcatctttagggttttccaggtagagaatcatattgtcagtggagacagataatttgacttcatcttttcctatttggaatgcctttgctttctcttgcctgattgctctgggtaggacttctagtatgttgaataggaatggtgagagtggacacccttgtctagttccggttcttaaggaaaatgcttccagcttttactcattcagtatgatgctggctgtgggttcatcataaatggcttttattattttgaggtatcttctttcaatgcctagtttgttggtttttttctttttatcataaagacatattggattttatcaaatgctttttctgtgtctattgagatgatcatatagtttttgtttttaattctgtttatgtggtaaatcacatttattgatttgggtagatgaaccactgctacatcccaggaataaagcctacttgatcatggcaaattaactttctgatatgctgctggatttggtttactagtattttgttgaggatttttgcatctgtgttcattggagatattggcatgtagttttttgttgttgttttgtcttttccagcttttagtgttaggatgatactggtttcaaagacagggtttggaaggattccctcctctattttttggaattgttccagtaggattggtaccagctcttttttgtaagcctggtagaatttggctgtgaatccatctcgtccagggcttttcttggttggtaggttttttaaattactgattcagtttcattactccattatcggtctgttcaggatttctctttcttcttgattcaattttgggaagttgtgtggttgtatgtttccaggaatttgtctacttcctctagattttctaatcagtgtgcatagagatgttcatagtagtctctggagatcttttctatttctgtggtatcggttgttatgtcacctttgttatttttgattgtgcttatttggatcttctctccttttcctttgttaatccagctagcaatcctatcaatcttgttaatcctatcaatcttgtttatcctttcagagaaccaacttttcattttattgatctttagtatggtatttttgggtcttggtttcatttagttctgctctgattttagttatttcttttcttttgctaactttgggtttagttcttgtttttctggtttctttaggtacaaggttaggttgttaatttgagatctttccacttgatgtaggtgttttgtgcagtaaacgttcctcttaacattgcttttgccatgtctcagagattttggtatattatgtctacttttgtttgtttcaaagaagtttttgatttctgcattaattttgtggtttacccaaaagtcattcaggagttaagttgtttagtttccatgtatttgtgtgttttttagagttgctcttggtattaatttctatttttattccattgtggtctgagaagatgcttggtatgatttcagtttttaaaaagtatattgagacttgctttatgattcagcatgtgttcagtctttgagaatgttacatgtgcagatgaggagaatgactattctgtggttgttgggtattctgtagatgcctattaggtccggttagtcaagtgttgaatttaagttcagaatttctttgttcattttctgcctctgtgatgtgtctaatgccatcagtgaagtgttgaagtctcctcctattattatgtggctgtcaaagtattctcttaggtctagaagtaattgttttataaatctgggtgtgccagtgttgggtgcaaatacatttagaatagttaaatcttcttgttgaatttaaccttttatcattatgtaatgctcttacttgtccttttttttactgttgttggtttaaagtctatattttctgatatatgtataagagtagggacctctgctctttttcgattccatttgtgtggtagattttcctccatccctttactttgagcccaggggcgtgatcatatgtgagatgggtctcttgcaaacagcagaaggacggatcttggttttaaaattcaatttgccaccctatgtcttttatttttagtcttttttcaaaagacagggttttgctccatcacccgtgctggaagtgcagtggtatgagtatgggtcactgcagctttgacttcccaggctcaagtgatccttttgcctcagccccctgtctcttctggtttataaagtttcttctgtgaagtcagctgtcattctgatgggtttctttttataggtaacattatccttttctgtagctacctttaagattttttcttttgcgttgatcttggaaagtctgatgactatgtgccttggactcggtcgtcttgtatctcacaggagttccctgggtttcttttctttctttcttttttttttttttttctttttgagacagggtctcactctgttgcccaggctggagtgcagtggtgcaatcacggctcactgcagccttgacctcctcccaggctcagacaaccctcccatgtcagcttcctaagactgtagctgggactacaggcatgtgccatcacacccagctaaatcttttttttttttttttttttttttggggattttgtgttgagatggggtctccctatgttgcccaggctggtctcgaactccttggctcaagcagtcctcctgccttggtgtcccaaagtgttgggattacaggtgtgagccaccacacctagcctggatttcttatatctgcattttaacctctcaagcaagattggggaaattttcctgaattttatccccaaatatgttttccaagctgcttattttctcttcttttctctcaggaatgccaataaggtatacatttggttgttttacataatctcgtatttctcaaatacttacttactttcttttttttcctgaattttcgagacagggtcttactctcgcccaggctggagtgcactggtataatcacagctcattgcagcctcgactttctgggttcaggtgattcttccgcctcagtcttcctagtagctggactccaggtgtgcatgaccatgcactgctaagtttttgcattttttgtagagatgggggtctcaccatgttgcctagcctggtcttgaactcttgggctcagaagatccacccgccttggcctcccaaagtgctgggactacaggcatgagccatggtgcctggctgctttgtttttttttttttttttgaagcagagtctcactctgtcgcccaggctggagtacagtggcacgatctcggctcactgcaacctccacctcccgggttcacgccattctcctgcctcagcctcccgagtagctgggactacaggcgcccgccaccacgcccagctaattttttgtatttttagtagagacagggtttcaccgtgttagccaggatggtctccatctcctgagctcgtgatccgcccgcctcctcctcccaaagtgctgggattataggcgtgagccactgcactcggcctgttcattttttaaaattctttttttttttttcaaatttttgtctgggttcatttgaagcactgatttttgagttctgaaattctttcttttgcatggtctcatctgccgttaagacttccaactgtattttgaaattcctatagtgaatttttcaattctagaagttctgttttgttccttcttaacatagctatgtcatcttttgaatcttgagtcgtttttgtgttgtttcttgtcttggatttcaattttctctttgatcttgttgcatttctttgctatccatatcctggattctttatatgtcatttcagacattcattccggttagaatccattgctggggagttagtgggatcctttgaaggtgacaaaacagtctggctttttctactgctggagttcttatgctggtttcttctcatttgaaagaactgatgttttcttttttttgattttgttattgtttggatgagagttcttgatttttttattctttttgtccttggggctgttactgtggtgtatattgtgtgtgattgtttggctacgtttctgggtattttcagagttccaaggctgtttatgagttccttggttgcagagaggttcctacagtggctttctcctttgttgcttgtaggggtgtaattttgtttggtggtgttgtttaagctgcagtccagtagatggcgcttaagagtaatagctgcctggggaatgggcagagggaggcaacagagaagcatgaaaagcgccctcccccagtacacattcgcgttcagcggctggagccactggagaagccccaggaagcagtttctttcagcccaaactctccaggccccagcaggaggacgcactgccaagtccgccacagcacattgaggaggcgggaagggagtatgagacgaccctctctccatgttcgttccagggctgtggtggtgccacctttagcggctaatgccatgcccgtgtttcctttgacccacggtggcctttggaggctgtgctcccacctcccttgtgggaggaccacaccaagagttgggtctccagatctggctgttttcactggcaaggtgtctgtttgagttctgtggttataaatagcatttctgtggtggcttgtgagcaggctcactgcctcctgtaggaccagggggcagtggtctcaggagactaacctcgttcctgagtgctgtgtgcttatgtctgatttcttattgtgttgtgccattcaacgtccaggccaagaagtggcttttgggttaagagccagctgtggccaatatagttgagtagaaacttgatccttgtttactggggaaactctctgttgcctcagggccaatctgtggagtgcacagtggtctgagcgccctgctccaacctggaggagggcttcaagatgggcaggccagaccaggcaggcccacctacaggtcccccaatggcaggtccgagcatcagctttgaggggtggtccaatgggtggctactaggcacatagagatgtgcctaggtgtggagctgggaacctcacctggtctcaagttctctgcatgaggcagtggagctgcctaatctcatccaggagagtgggtcctccaggtgccaggagatctgcttgggtatggagcagagagggccctgctgcaccacagtctctgcacaagaagggaagggtagctctggctgcagatccaggcaagtgggtgctctgaatgcctggagatactcctgggtgtggggaagagagggcctcactgtaccacggtctctgcacaggaaagatgggtggctcaggctactgatccaggtgagcaggtgctctgaatgcatggaaatctgcctgggggtggagtgtagaaggccctgctgcaccataacctcaggagaggaggctgggcacccagcagggacacatgcaaaccagttccaggccaccaagctggctctgtctgcacgcctcattgcccagataaaccatggctacagcgactctcctcttacttttggacctgtgatgggggagagcacaattctagtacctactgttgggttactttctatatttgttgctcagttttggctgtggaggcctttcccctgctgcagagcaaatgctgcaatatttgatccaagactaaattgtctgcatgaccacactgccaaattgctgaagaatgactgccttgtttgagcctggattaaaaatggcatccccttgtcattcctggttctgagaaaatacatgcagcttttctcagtgtgtccgtctcagcgtctgtaagcttttccccaagttagctccaaggctgaagagaaacaaagtgctctccctcggcctgggttgcgcggatccctagcagtaagggaaatgacagcgggaggtcctctgcctcttatgtattgaggcttcactcacttttaccagccagatgccatcatggaggctgtttgcccaccttctcctctctggagtctggggtgtcctttgctgttgaagtggatttccgttttcctgtttgaattaaagctcacagggtttatctttatgcactattttgctatttgcaagtggctgaggtatgcggaaagcctctcatctgccatcttgggaaaaaaggtcatgtgacttttgagggacttaagtgaccggtttaacctcattatcagtttcctcatctatgaaataagaaaaacggaactacctccctgatggagtggttacagggatgaagtgagctactccatgcctctcactgccatttccaaatgagacacatgaagctcatggagggtcatcaacttgctcgaggttatagaactaaaaatggccaaactgggatttgagcccactctgtttccaaagcctgtcccttagctcttccactgttgttgtctgatgaagtatatacaaatatatgcatttaatattaaatgactgcaattacttgtttgcttttcgagaaaatcaaggggttaactgatttttacagctagagggtaatgacaggaaagcaaactcctctcccctggtcacctaccctctcctcatactgcttttagtgtgctgtctccagggtgacgtacaccccacagccaagacagtctctctaggatcttcagacagtgtcaggcctctctggttaccatcttcctcctcatcttcatcaccatcaatataattcatatagaataagagtatgtctcacatttactaagtgctcatattctgtaaagtacatcatgattcagatcctgctcaacaactctgaaaggtagacattactttcatccctgctttacaaacggaggaaactgaagtttaggtgaagaattttgccaaattcacatagttggtaagtggggattcagacccaggctgcctggctttggaggtggattcttaagccctagactctgctgctgctccttccattcgaaatggctttaggtaaaaaccttttgtcttcattgtgactgtttaataggctacactgatcctcagaaacagcagataacgggattattgcggattgaactgaatcactgaaaatagaatattttgatgtctcaaatatattttcagaaatctaaaattataccagatagactaagtggggaaagataaacatggagtatcacataatatatgaaaaactaacttttctaaactgtaaacaaatgtattgagaataagctacatgctttcagcaaaatcattgtaattaagaatgataaagtatacattaatacatatactgttgaagcttctataatcatatagccatttacatcagactaggatacttgtagagaagtttttaaaaaattttttctggaatgatttccttccccttctagatcggcaggattgggagaagggtatttttctagactctgaacgcatagccacttcctctttttacctttttctgggtccctcctcagtctgtagtgccctgtagtcatttggtacaagtatttccttcaggcgacagcccagcagcactgagaactgctcactgtggacatgaacccctcctgctgtgttagtgaggcttggtgcctgtcttctctgggtctgctgctgacacagagctaagcacatgaattatcagactgcgatctgagctgagacagattctctctgctagaaattgagaattaggatttggggagactgagccagttactatgaggttgtctctgggctttggggctgaagacatctctgtgctgggtcaggtgtaggcagaacagagaaaaggcagtgatggggagagaatctggcagctcctcaggagggagaagaggagtgggagagaagtggagacttgctgccttgactcttgatggcctctcattactaatccaaggcagtcttgagtcccagctcttgttacttcctgctgattccttttaataaatccacttttacttatgccactttggcaaagttttggttgcaaccaaatcatctctccagcagtgtgagaaaatacagagtgtgaggcacttgcagttcaataaagttacagatacatagtttactcagtgagtttggtttaactcagtgtagtttttatttcccttactgcaggtgtctcctgcctgtccctgaggctggctgcttcttaggcccagtccttaggaaaacagatggagcgtgtgtgtctggtcaacatagttttaggtagaaactggctctttgaagccattcaaacctgagcctattggttgactcccaaaattttatggctaaaacttgtttaactttatttttcagttttctcagcccacagtttaaaccagaagtagctttcctctgaacttccactaatttcatttactagatcatgttttctgagatcttagtctctattctgtgccttgcattcttccacatctcctggctggtcctctggcctgccggtcatttggtcaggtagcattttacagttccctcctccatctgacagccttttcctctatctagctctgaagctttagtacattaagacccactttaaaaatgtgatgagagctttgggttctgtttccagaaaattgaatgtttatatatacacacacaccaaaaagtgtacactttcaggaattttggggacttctcaggttaggaacctagaaccctggggaaaccaagagctgcaacatgatccataaaaaaatggggtctagaacatttcttcagagtcagcctttgtggccttttagtgttgacttttcccccacacttccgtgtaggaactgagaggagaggaggtaaagatgcccctcacctcagactcatgctttattctgtcagtgatgctgtgttcctttccccacctggggccagccaccaaggaaacctcctattaaaataatcattcctgagtttggccatggaaggtatgagcctataccaaaagacgttctacttaaataatgtaagatacccaccttccattgttttggatgctccttatcggggacctgccccgataatcacgtaggttcttctctattttcctaagtgtcgactggcttgagaaataaaaggacagagtacaaaagagagaaattttaaagctgggcgtccgggggagacatcacacattggtaggatccgtgatgccccacaagccacaaaaaccagcaagtttttattagggagtttcaaaaggggagggagtatacgaataggtgtgggtgacagacatcaagtacttaacagggtaatagaatatcacaaggcaagtggaggcagggcgagatcacaggaccacaggactgaaacgaaattaaaattgctaatgaagttttgggcaccattgtcattgataacatcttatcaggagacagggttttgagatcaaccggtctgaccaaaatttattaggcgggaatttcctcttcctaataagcctgggagcggtatgggagactggagtttatttcacctctgcaatcttgaccataagagacaggtacgccctggggggaccagttcagagacctacccctaggtgcgcattccctttctcagggacgttccatgctgagaaaaagaattcagcgatatttctcccatttgcttttgaaagaagagaaatatggctctgttctgcccagctcaccggcggtcagagtttaaggttatctctcttattccctgaacaattgctcttatcttgttcttttttcagggtgcccacatttcatattgctcaaacacacatgctgtacaatttgtgtagttaacgcaattattacagggtcctgagatgatatacatccttctcggctgacaggattaagacattaaagcaaagacaggcataggaaatcacaaggatattgattggggaagtgataagtgtccatgaaatctttacaatttatgtttagagattgcagtaaagacaggcataagaaattacaaaagtattaatttggggaactaataaatgtccataaaatcttcacaatccacattcttctgtcatggcttcagctggtccctccgtttggggtccctgacttcccgcaacactcctgatattcagccttctgcctgaatgaggaggaggaaagaaattgattggagggcagatgaagaaggcaccccgtccttcaggtcaggtcttcatggtgcaacctcattatctcatttgaattcttacgaatgtctcccaaattcaaaacattcagaagcacaaatgctgcatttagttagtgataaccagtaggtaagcgtttgcacaaatctcagttcctgtatctttggaatggcaaacagtaacatcctacctaactaaacattttgacgaatgaatgttagccagaaaatggctaaactaagggctaacagtcttagctcaggcacactggggcatgacagttctagttctgctagacttcaattaatcttccaatttccaagataactaaaagtcagagtgggcaacgtggccacttgatgaagcgggcctctacagagggtcctccaaataggagtctttcgatggaatcaatccaaatgcccatgagtggtagaccagataaagaaaatgtggcacatatacaccatggagtactaaaaagaacaagatcatgtcctttgcagcaacatggatggagctggaggtctattaagtgaactaacataggaacagaaaattatcacatgttcttacttatgaacaggagccaaacattgagtacatagggacacaaaaagggaacaacagacgccgaggtctacttgagggacgagggaggtcggagcacgaggatcacaaaactgcctattagaccctgggcaacatggtgaaaccctgtctctacaaaaatacagaaaaacgggcctggtgttgtggtgcatacctgtggtcccagctacttgggaggctgaggtgggaggattacttgggaccaggaggtcgaggctgcagtgagccatgatcacaccatacactgcagcctgagtgacagagagagaccctgtctcaatagaaaaacaagaaaaactacctattgtttactatgcttttcaccttggtgacaaaataacctttacaccaaacccccgtgacacacaatttgtctatataacaaacctgcatgtgtacccctgaacctaaaaaaaaaaaaaaataaataaaagaaaacaaatagaagtctttccattaggtctagggcccgcttctctgggtatgttagcggtccttagggccacgtctttgtctggagatttactggaaggacccgtgagactctgcatttagttgcactcacagttagattgaaggcagccctgtagtgagaatatgcagccagatcataagagaaaaagacacaggtggcatctgcagcaatccaaatccacatcccggcttcctcatgttttttcccaggaggggccttacggagcttactcttccccagcaacaaaaatgtagccccaagtggatgatgtttcagtccaagaaagcccaggtattagagactaagtgcccaaggtttttgttgggagatagtcacatgcgcatcctttacctagtgtgtaccaaaattccaggctcccagaaggcgaggaggtattcagcatgacaactgcacatgcacagttttgtacaaacagtttgggcacatgggatacaccctaaccatttagggaatgttttatatcagtttatagaactgtgtaccagccaagttcccagatgccaaaacaggtccaagtttgcaggcaggcctttctaaggatagtaggctcaggcctgctgtgtttactctttttctgcacgctgagtaccttttaactgccgtagtgaggaacttaggagcagggaagaggatgacattctggttctcctgcaaggatgctgtcataaagattcatagcctttcctcttttgctttggcagggtctccccgttctataggtgaagtgcgaattgtcagccacattcaaaaagtgcaggattaacttcagtgtggagcctgggaatccagaagaatgtggccattacgggttaaggaaattacaagccatgcagtcttatgtcactggattaatttggcacaggatgaaaagtccctcaaaagcgctccttgttttagctttccagttggttgatttctctttgagagtgaccctggagggcagaatcagctctgtgagctttctttctccttccacccctaagcctgattgcatgctgtcgttcggtccccacattttttggagaagccaggtgttgccacgtttgtcctgctctctcgtctacatctggtcaaacttcccccttcacactgagtcacactgaccacccctcccagatctgctccctctatttgtcttttggatttttctctaaaaagcgttttattttgtatttttaaatttaattttttttgtggaggagtctcgctctgttgcccagcgtggagtgcaatggcgctatctccgcttactgcaacctccgcctcccgggttcaagccattctcttgtagccctcctgagaggctgggattacaggcgcccaccaccaaccccagctaatttttgtatttttaatagagatggggtttcaccatgttggccaggctggtcttgaactcctgatctcaggtgatccacctgcctcggcctcccagagtgctgggattacagacgtgagccattgcacctggccgaaaaagccttttaataaaaaggtttaaaacaatttctagacttctgccatccagtattagtgccattttcctcctcccatgagccatcttcaattcatttaagatggccatggaaggtatgagcttgtaccacgggactttctacttaaataatgaaagacacccatcatctattgttttgcgatgctctggtattcagccttctgcctgaatgaagaagaaagtaagaaactgattggagggtgtattgaagaaggcacctctgtctttcaggacattattagtcattagtcattactacttcttatgcagatatttgtagaattaccttctttctaatatcttacctatgcatacctaattcataatgatttgggagcagggtttggcttttgcttttgtttatatcttgttctttcttgaccagatagtgatgaattcttttgattgtcatgcagtattctgtaagtttttcttgatatgacagagatacatttatctagaattctagagcagagtcaaacctaatcattggaagctctaaagatctgtactctgcctggaatttgcttcacaataattttaagggtgggaatatagatgaactaagattggtcatgagttagtaattgattcggctaggtgatgatgtatgtaggagttcattatattattctttttccttacatttatgtctgaaattattcataacaatagttaaatgacctgatacttgttgctagcatccttgtatacaattattaatttattcagcaaacattaagctgctatgtgaacaggtacaaaagattaaaaaagcatgtcatgctttctagaagtccaatatttagtgagaaagtcagctgtgcaactgtgacacagtagaaacccagtagcatggtctggagatcgtctgagtttggacctacaaggagcctgtcgtttgctttgttcaaagccaggttaacaccatttctgcaatttaaagacttcgtgtactaagcatttatttgtgagtcaacatagttgtgtcttcagaagatttacctattccattcacagtagtaggcctgcagaggatataatggatataattatgaaatacaaaactctttttcctaagcattctagtctgcttgggggagagggtaggcattaaaggctcagtgaggagctggtgtttcagacatgggcaagctctagttcatgcaaaccgtgaatcaacagccaaccctgaaagggtagatagtattgatgtatctgcagtttacagatcaatgcaagaaaatgaagcttggagagctgaaattaacttgcccaaggtcacacagcttgctttattcatttatagcctgacttcttccaaaagggatttcgggcagctaagccacacagttagaaagttccttgtggtctttctactgtcccaagaaaaacaaggctgtatttttttccttttgagcttaaatgatgcatagtgtttcagtcaacattactacatggatggcttcaagtttaaattgcacaaaagtgcttatgtatgtctctgttggaatgtgtgggagtaagaaaggaaatccctgtatttgatttcataaagtcatgagctttatatagttgcttgagccacacatgccggtgcctggctgtgtgcacaagaaagttcttgttaatccttgcacagctggtgtggtgtttgtcgtcattattacttattcttaattaccagaagtgcacatgggctacagattttagcctgtgccaaagtaaatctctaaagtagttggattaataggttatggggaagatttataatcctttgtgaatgatactaattctgtatatgttcatataaagaaacagttgacatcagaaactcaaaatgtagatcgtaatctcaatgttattctcaatatccatctcctgtactctttaatttgttgctgaatcaacattgctttattcgtagattgaaaatggaatttatttctaggctatcccattcttaggcaattgtctgtctttctctgccccagcaatacgtaaaagttgaaacattctcctaggaaaggcttcaaatacttgatttctctggaatgtcatttatgtttaggtggaaatggggggaaatgaccgctaagaggattagtcattattttcatcatttaatgaaggaattagattatttgtgcttaatgtgctaataagcacagagtaagctgtacttattgatgggtcgacgtggaaaggtcctctgagtgagaattgtttcttgtgtgtaatcgtattattctgtggttcccgcagaactgtgtttctagggccacagacagatccacagtgtaacttttttggaagtctatgtgtttttatccacattctatgtaacttaaaacccttttactttattttattattgagatagatccaaactgttataaattgtttttcattctccattgctacccattcttggcagccttcccattcattcctctaggtcagtgataaccagtttttatgtttcacatccttttgaggatttgatgaaaaataatccactttctgaaaacataccagtgcgtatacaccattcatatacgatttaagggcacacagtacctccaaagtctatgaatagacttggttagaaaccctggctctaggtgaaaacagcaagggtgatattaaaatactgtaataaaaatatgtgatctacttacagtgtggagtgtgggaggagtagggaagcttatcaagttagagcttgccacatgttaccgtatattatgttttccttatgtatttaccagcattatttcttgtctacttattattatctaaaacagatatctcaaacatgttttaagatgacagagtaaagacagatttgtcagccttacaatacagaccaccagtaggttagaagaaaaaataataacctggtatcagtcagagacaaaggctagagaccagcaaacaaaatttccaaaaatttgcatggtccatctctctctctttttttttcatgacggagtcttgctctgtcacccaggctggaatgcagtggcgcgatctctgctcactgcgagcttcgcctcctgggttcacgccattctcctgcctcagcctcccgagtagctgggactacaggcacccgccactacgcctggctaatttttttgtatttttagtagagatggggtttcaccatgtcagccaggatggtctccatctcctgacctcgtgatccgcctgcctcagcctcccaaagtgctgggattacaggcatcagccactgcgcctggtggtccatctcttttatactcccaacttgaccttccacagggggcctgtatgtgtgaaatactcaaaaagctcttctttagaagtaggtgcaggagatggtttgggcagctttgggtaaagacttgcaacttccacaaaggtacagtctcctcctgattgtcctcctcttttcagagaaaggagagaatagctaggatatggcctatggaaacctctatcataaacacccagagttagccatctccagcaataaacagaaaggcagtcgaaaacaaaacatcaaaatggaaactaaataaaaaatgaattgcctcaggagaggaaggtgggaaagatgaaccctgagatagagggggatgttttgtttcctaccctcataacttccaatgtgattgtcttaacatgaccatctcatactctgtccatcttgtgccttgagaatgctaggaagtggatgataaactggcccagactggccatctgagactgagactccctgggggactgaaggaccagagcttctgttggaatcgtgtacagcccagtcaggggagtgaacacagcttgaagtgtgttagcaaaaccacagcaatgagggcaatgaccaggctgcatagatgcctggctgaatcctcatcctccctgtacccatttgttatggactaaactgtgacccctcccaaaattcatatgttgaagccctaactttaaccattgtaactgtatttgaaggcagggtcttgaaggaagtaatcaggtgaaatgaggtcatgaaggtggggtcctaaccctataggcctggtgtccttaagaggtacatgcacagagcaaaggccatgttgtgagggaacagggagaagcagccatccacaagccagggagggaggcctcaggagaagctagccctgccagcaccatggtcttggacttgcagcctccagaagtgtgagaagataaatttctgttgttaccctgtctgtggtattctgtcatagcagccccagccgactaataaccattctctcatgtgacagaacactgagcaggcaaaactgtagtgcacggaagaataacacagatatccaaaacatgggaagagattcaagaagttgtcacccctggtgtagtggtgtgaataaaaagtgttaacaaagctgtccacttaaaatatttgtgtaattgaaattaactaaccaaaatacccagtgtggaatctacaaacgtattgcagcaggagggaaaaatgtaaactgtacatcaataatctattttggaagaaataactgatctaagaaagagaagaaatgaacttactaaaattaatctctatagaactattcagtaaaatgggaattcaaaaataaagtgactaaatatgattctttaagggagcttgctgagctaagacaacagacatccaaaacaacatttcaaaacaaatgaacaatttaaaaatggaaatgagtagaatcaaaagttaaaaaatgatcgttgatgaagcagtcacagtgaatgaaaggagaaagacagatgagaagatggagaaagcattggatgtggaggacaaagatggcccatcagaaggcatcaacacaggtatagaaccagacacgtagaacagaaataactttaatggtaaaacaacagaattttttttgtcagaatcaaagaataacttaacctggtcaaagaatccactaaatttcaagaaagattaattctgaggttgataagtcttgagtatcaatttctggccacaaaggaaaatgccagatttcaaaaggcagaaataatcacttttttctcatccataatagttctcaaatttaggaattaccaacagtaataataggagcaaaaaaattagtcccagtaataaggaatttttaaaactttcatgtttcatggattgaagtagaaaccttaaaaattatagaatatctagaaaaaatattacaaaaacaagcatatcaaaactgaaatggcagggcaaaacttacattctgagagaagtttatagccttaagtaactgtatagctgagtcagaaaaaaatgaaataagcattcacctactccccaaattagaagataataacacatacaaaagcagaaattaatgaattaggaaagagaaaaaaagtagcgtttatgaatcctaaatttcaggggggattgggaaggataaaagagataaactgtgggctagtcaaggaaagggatggggagagagggcctacatgtataaaaacaaatacagaaataatagatatacagtgcatataattttaaaaatctgaatgaagttagtgaaataaactgagagaattttcaaagagcaatcatctattccccaaaaagcaccagagtcagatattttcactgctgaatgctttaaaactcagaagaaacagttaaatctttggatattgaaactggtctacaccatagtgaaggaaaactgcaaattctttttgtgacgtcagcagggcactaatgccaagtctgtgaaagataaagttgtagatcagttttacttaccaatattatatagagttcttaaataatatttcagcaaatagaatcaatactttataacattgcagtttaggtcgttttcatccctgaaaggggatgatattgagccacaagcatggctcaggatttgaaaatacattagtatatcctactattaagtgaaaagagaaagtcagcagattcctaaaagcatttgagaaaatttacattaattcgtgataccatacttcaatgaaacagaaattgtagctacttcctaaatatatcttaaaatttgtattttagcccttaatttagtattctgtttaattgttgaaatgtttataatattgacaacatgacttactatttctattaactattgccctggaagaactagacaagaagagagaagagagggaaacgaggtggtatctaaaacctggaaggggaaaattttgcactatccacagatatgattgtgtacatagagagccctggaaaacaaatggaagaactgttatgctaacattgagagacaggactagctggatttcctaggtggactaagaatccctaaacctagctgggaaggtgagggcattgacctgtaaacacggggcttgcaacttagctcacacctgaccaatcaggtagtaaagagagctcactaaaatgctaattaggcaaaaacaggaggtaaataaatagccaatcatctatcacctgagagcacagcaggagggacagtgattgggatataaacccaggcatttgagccatcaatggctaccctctttgggtaccctccctttgtgagctctgttttcactctattaaatcttgcaactacacactcttctggtccgtgtttgttacagctggagctgagcttttgctggctgtccaccactgctgttcgctgccattgcagccccgccactgacttccatccctccggatccggcagggtgtctgctgtgctcctgatccagtgaggcgcccattgccgctctggatcaggttaaaggcttgccattgttcctgcacagctaagtgcccatgttcgtcgtaatggagctgaacactagtcactgggttccacggttctcttcagtgacccacagcttcgaatagagctctaacactcaccacatggcccaagattccattcgttggaatccgtgaggccaagaaccccaggtcagagaacacgaggcttgccaccattttggaagcggctggtcaccatcttgggagctctggggcaaggacccctgccctgcccccctcgtttacaacatgatgggggattaaaaggaattaccagaatggatagcttccttactacaagaatcagaaaatacagtgggaaaaatagctcctattaacagtgtttttttttttttttaaattatactttagtagggtacatgtgcacaacgtgcgggtttgttacatatgtatacatgcgccacgttggtgtgctgcacctattaactggtcatttacattaggtatatctcctaatgctgtccctccccctctccccaccccatgacaggccccagtgtgtgatgttccccttcctgtgtccaagtgttctcattgttcaattcctgcctatgagtgagaacatgtggtggttggttttttttgtccttgcgatagtttgctgagaaggatggtttccagcttcatccatgtccctacaaaggacatgaactcatctttttgatggctgcatagtattccatggtgtatatgtgccacattttcttaatccagtctatcattgatggacattggggttggttccaagtctttgctattgtgaatagtgctgcaataaacatagtgtgcatgtgtctttatagcagcatgatttataatcctttgtgtacatacccagtaatgggatggctgggtcatatggtatttctagttctagatccttgaggaatcgccatactgtcttccacaatggttgaactagtttacagtcccaccaacagtgtaaaagtgttcctatttctccaccttctctgcagcacctgttgtttcctgacctttttaatgattgccattctaactggtgtgagatggtatctcattgtggttttgatttgcatttctctgatgaccagtgatgatgagcattttttcatgtgtctgttggctgcataaatgtcgtcttttgagaagtgtctgttcgtatccttcgcccgctttgtgatggggttgtttgtttttttcttgtaaatttgtttgagttctttgtgattctggatattagccctttgtcagatgagtagattgcaaaaattttctcccattctttaggttgcctgttcactctgatggtagtttcttttgctgtgcagaagctctttagtttaattagatcccatctgtaaattttggcttttgttgccattgcttttggtgttttagacatgaagtccttgcccatgcctatgtcctgaatggtattgcctaggttttcttctaacttaggtttaacatttaagtctttaatccatcttgaattaatttttgtgtaaggtgtaaggaagggatccagtttcagcttcctacatatggctagccagttttcccagcaccttttattgaatagggaatcctttccccatttcctatttttgtcaggtttgtcaaagatcatatggttgtagatgtgtggtattatttctgagggctctgttctgttcattggtctgtatctctgttttggtaccagtaccatgctgttttggttactgtagccttgtagtatagtttgaagtcaggtagcgtgatgcctccagctttgttcttttggcttaggattgtcttggcaatgcgggcccttttttggttccatatgaacttcaaagtagttttttccaattctgtgaagaaagtcattggtagcttgatggggatggcattgaatctataaattaccttgggtggtatggccattttcacgatattgattcttcctatccatgagtatggaatgttcttccatttgtttgtgtcctcttttatttcattgagcagtgctttatagttctccttgaagaggtccttcacatcccttgtaagttggattcctaggtattttattctctttgaagcaattgtgaatgggagttcactcatgatttggctctctgtttgtctgttattggtgtataagaatgcttgtgatttttgcacatcgattttgtatcctgagactttgctgaagttgcttaccagcttaaggagattttgggctgagatgatggggttttctaaatatgcagtcatgtcatctgcaaacagggacaatttgacttcctcttttcctaattgaataccctttatttctttctcctgcctgattgccctggccagaacttccaacactgtgttgaataggagtggtgagagagggcatccctgtcttgtgccagttttcaaagggaatgcttccagtttttgcccattcagtatgatactggctgtgggtttatcagaaatagatcttattattttgagatacatcccatgaatacctaatttattgagagtttttagcatgaaggctgttgaattttgtcaaagaccttttttgcatctattgagataatcatgtggtttttgtctttggttctgtttatatgatggattaagtttgttgatttttatatgttgaaccagccttgcatcccagggatgaagtccacttgatcatggtggataagctttttgatgtgctgctggattcggtttgccagtattttattgaggatttttgcatcaatgttcatcagggatattggtctaaaattctctttttttgttgtctctctgccaggctttggtatcaagatgatgctggcctcatcaaatgagttagggaggatttcctctttttctattgattggcatagtttcagaaggaatggtaccagctcctccttgtacctctggtagaattcggctgtgaatccatctggtcctggactttttttggttggtaggctattaattattgcttcaatttcagagcctgttattggtctattcggggattcagcttcttcctggtttagtcttgggagggtgtatgtgtcaaggaatttatccatttcttctagattttctagtttatttgcgtagaggtgtttatagtattctgtgatggtagtttgtatttctgtgggatcagtggtgatatcctctttatcattttttattgcatctatttgattcttttctcttttcttctttattagtcttgctagtggtctatcaattttgttgatcttttcaaaaaaccagctcctggattcattgatttttttgaagggttttttgtgtctctatctccttcaattctgctctgatcttagttatttcttgccttctgctagcttttgaatgtgtttgctcttgcttctctagttcttttaattgtgatgttagggtgttaattttagttctttcctgctttctcttgtgggcatttagtgctataaatttccttctacacactgcgttaaatgtgtcccagagattctggtatgctgtgtcgttgttctcattggtttcaaagaccatgtttatttctgccttcatttcgttatgtacccagtagtcattcaggagcaggttgttcagtttccatgtagttgatcggttttgagtgagtttcttaatcctgagttctagtttgcttgcactgtggtctgagagatagtttgttataatttctgttcttttacttttggtgaggagtgctttacttccaactatgtggtcagttttggaggaagtgtgatgtggtgctgagaagaatttatattctgtcgatttgggttggagagttctgtggatgtctattaggtccacttggtgcagagctgagtttaattcctggatatccttaactttctgtctcgttgatctgtctaatgttgacagtggggtgttaaagtctcccattattattgtgtgggagtctaagtctctttgtaggtctctaaggacttgctttatgaatctgggtgctcctgtattgggtgcatatatgtttaggatagttagctcttcttgttgaattgatccctttaccattatgtaatggccttctttgtctcttgatctttgttggtttaaagtctgttttatcagagactaggattgtaacccttgcctttttttgttttccatttgtttggtagatcttcctccatccctttattttgagcctgtgtgtgtctctgcatgtgagatgggtttcctgaatacagcacactgataggtcttgactctttatcctatttgcccaacagtgtcttttatctgagtgtaagcctaaatcagcaagtgaagaacacctatgtgaagaaagctgcaaaattatgctaagagacgtgagagaaatctccttgaggggaggaactacgtggttttctgtactgctggcgggggtgtgaactggaacatcctttctgtgagggtttggcagtgtctatcaaagcttgaaatgcacttagagccaggtccagtggtgcacgcctgtaattccagctactcaggagactgaggctggaggagcccaggagtctgaatccagtctggacaacatagcatgaccctgtctcaaaaataaaaaattgacttaagctttgaagggcatctctctgctatcaaatactctacagatattctctcaaaattttgcaaaaatgcaaagcaccttcactgccacattgtcttttaatgcaaaagtcagaaacaaatagtcttcaacaggtggaagaaacattctgtagccttttgaaaagaatgaatagatttaaatagtgatagtgattgtggcagactcaccctaagatgacctccagtgacccaggcccttgtgtgcaagtacctgtaacttgattctacccagtagaatacagcagatgtaaatcttttattatataagattgtcttagaccagagagagaaattctcccatttgcttggaagtaatcaaccacgtgaactgtctgtggagagggccacgtggcaggaaaccgcaggcatcctctaggagctgaggcagccgccagcccatagtcagcaaaagccacggcctttagtcctgcaactgcaaggaaatgaattctgccaacaacctgaatgagtttggaagcagattgatccccagttcagcgtccagaatacagcttggctgacaccttgattatagctttgtgggctgaggacctccagagcagaagacacagtttagctgtgcttagcctctggacccatgggaactttgagatcattgatagctttcttatttaaagcatgagtcagaaaatataataagagtaagcattttgttttcagctgctgagattatgctaatttgttgcacagcaatagaaaactaatacactgaaaaatggaaccatctccaagacactggtatcctgtctcactctgcattaaatttaaaaaaagaatctcatgccacttgctgatccaacttgctcttcataccctcacttattacacttcaggcacactggcctatttggtattcctggaacatgctaggcacatttatgcctcagggtctttgcacttatttgtttattcccagtgtctataacgctgcatgtcccatattaggcattcagttagtgtgtgaataaataataaatatttaagtgtggaaccgtatctactaggatcccttgtgtattcacatacatatataagctaggtgtgctggctcatggctgaaatctgatcactttgagggcttgaggcaggagggccacttgagcccaggagtttgagaccaccctgggcaacatagcgagaccccatctctatttaaaaaaacatatatagaaatatatatacaatagtgaattttacaatattctgtatgtatcagtattatcaattattatggcccttttgtggttttcttctttgactaaaaagccaactaaatggctattaaaatgtatattaaaaaacaaatattctagttctgtatctcagagtgtagaaatatgtcaatttgactaatctgttgggtaaaactagaagttgctggagggaccaggttttaatttgaagaaactttaaacagtgaatctgattcttctttgagtttgtacaccttaaattcttatgtcctttctctttcatgattgaggttcttgtgtcttgtccttcgatgacaaaaacgtgaagcagtgagagaagtatttacatgtgtatgatctatttaatgtattatgttaattgtgaagcatttacatgttgaagttactttgggaatgattattttactcatgcaaattaccgtctcattacacaatattaggtgaaacaaatacatgtatctcttagtgcagattaaaagtagccacaaatttctttcacactccttccgcagagatatgggggtctaagtatctctttcccttaaacctgagtagaactcgagactgttttgatcattatactatggcaggagtgactcttaattaaggccctaacactggcagctgccacttctttcctcctggaacgttcttttctggaggaagccagctgccgtgttaaaagttcagccaccctgggcctgccaagcattgaggaagcccatgctcaccgtgtagagaggctacagagacggggagagatacccggcctgccctagctgttccagctttcctgtccaggcactggacatgtgaagaaacctcttggtcatcccagacgttagcagacatgacgtggggaaaacggaggcacccagctgacaacgaaaatggtgggaacgtcaaatatatgacccttgtcagcctgttccagctatttcccgtcttttgcctgaccccagcagcgtctgatcattgttgctgtgccatgcccacattcccaagccagaatattcctagcataataaaatggtggtggtctgccactgtggagcattagagagctctttcatcaacatacagaagctatgtcccacagtttcactgaaaatgaattttggttttgtgaatttgatttccctgttgacttacttcctattgacttccagaagagagtacttttaaggggaaaaaagggaacattttaaaaagattatgtgtttaaagaagaataaccatgttatctgcatcttttcatgtgataaaaaaactctgacagtgaaaatgcagtgagaacctgccaggtgattagttaccctctcttcatattgtctcaccctatcaacagcatttgggagagtcagctccatggctaagatttccatgcaccctttccttcctccccatcagcccaccccagcacacatgctttgcttatcagtggacctttgtggcctttttctgaacagcactcagcagtactatactacctggatagcttttcttgatttacatatttttgcataataggatgtagaaaaattagacgaaattgcctgtaggtgcggtgggagttagcacacttcaaggaggttaatcatcctattcttggacaaaaatctgtatagaagaagaaaagggttactgtttagagagctaaataagaatgactttaatatatgtgtttgtgaaatggttacagtttattaaccttttttgtgtacttactatctgacacacttttctttcggaaagagaaaatcagaataaaaggaacattaagatgagatgagatgactgttacaggtcctccctgaaatgatcagggcaaccccattggcatgttcacatggttactctgtggatgtcatcagggaaggaagggagctcggattccagcatggtacagggagtgtttatcagggatggaggaagaagagtgtgacaggtcagcttgacaggattgctcagtagcgagaagtatgagtcacttggcttacgtagcttgatgaggatatcttctggggatgggtatgtattttctccttcagcgattcatgagtcagctattcaagcccttcatgcggtgtgtgaacctctttggaaagctcccagtcttaaccttgtaaaactttgctgacacagaactcgctgtctcccaagttaacctgctcaagcattgtgtaacttcagcaattcggaaggcttttcccctccttacattcagctgagatatactttcttctcaagctaaattcccagttttaacctctggggtcaaatacaaggtttacaaggttattcctcttccacttgatatggttttggaacttaaaaattgatactgtggcttgctgggtttctttctagttccttcagttgcatgacttagctttgaatgttcccggtcacagtcttcggagacacttccgtttctcagtaattctcttactgcagaactgaaatgtaatgccctagcatgtcccagtcaatcaggactgcagttgggttagcatcttcctccttctggatgtgccctgtgtttgttaatcctgtctaaaaggttatcagcttgcaatcatggcctgtggtggcctcatcctaggcttcctgtttatgttgaccttttgcattgctcctcctgaggcatacagtctccattgcttgtcttgtgtagctgctttttaaaacataggaactgcttgatagttttttctgttgaatctagtattactggtctctttgtttccaacctgctgaaagcatcttggatgcacttcttgctcaggaaattaatcagtatctcccccagtttcatgtcctctgctgatgaaaacaaagccggtgctaacagttactgaattagagctctgacacatgctattagaaacatttttgtagttttaaagtggtggatctcaacctcaagcaattttggcccgaaggggacatttggtagtgtctagagacagttttggtgatccccactgggggtggtggtactgctggtatgtatctagtaggtagaggccggggtgatgttgaacatcttacagtgcacagggcaatccctccacaacaacgacttagcagtccccaaatgctaatagtgctgagattgagaagcagtcagcagattaatgtagttctactaacagtgtctgttgggttggatgtttttaatcttgttaatcagacgtactatatcagcatgtaagactgaattctcaaagtgtgaactggggtcacctgagaccttttcagggttctgtgaggtgagagctatttttctgataattgcccttttcactcattccttaagattgtagtgtggtgttttccagaggcgatgatattaagacattgaattaaaacattgaatgcagaaggagacagagagtccgctgtctactgttaagtcggacgttaaagagatttgcaaaatgtgataaaatgcccttctcactaaattatttttgctttggaaaaatcattatgttaatatgtaatggtttagtattaaataatacatatatttaaaagttttaaattttttttactgtcaagatcaacagataatccacatgatcagaagttctttgggggaaaaaaacaaaaaagttatttgagatcctcaatacttctcttttttctcttttttttttttgagatggagtcttgctttgtcgctcagctggagtgcagtggtgtaatataggcccactgcaacctctggcctcccaggttcaagtgattctcctgcctcagcctcccatgtagctgggattacaggtgcacaccaccatgcttggctaatttttgtatttttagtagagacagggtttcaccatgttggccagtctggtctccaactcctgacctcaagtgatctgcccaccttggcttcccaaagtgctgggattatagccatgaggcgccatgcctggccgagatcctcaataatttataagagtataaagtcttgaggtaaaaaatgttaagatcctctgatctaggctatatttcttcattttatgtgcaaggatataatgtgttaacaattttaaaggccttgttagaatgtagatgtacagaattttgatgtttcccagtctggaagccctgtactgaaagaaattaattcacatgtttctagtgaacttgtagtagtttctggttatctttttctacatttccagatggtcaccgttttttaagtaatcaatccagagcctaatttgggatctccatctagtcagatggactaactcagcttcaatttcctctcctcactttgtgcataatttttgttgcagttaggaatgagtgtttgaaattgcctttggccctttgagtcgagtttccttttgggacctcaagtgttggaagcgtaggtgactttattcagaacgttgtgaaggctgcttttgtgaaacctcagtttctggtatctgaataaggaacagttctgttccttagagtgaatatataccttgattcccaaacatttttaatttttgaaattaaatttcctatagttaactaatcaaaacttaatagatgtctgtgttttggtcttagtttaagtatacagtttttagttatgttttccattcccctccactttttttttgtcatgaggttggagggagaatgaagttctgccctatgaatgaagtaggtgaggaatatagtgattaaatggtatacctgtgttaataacatgatgttggagattccagatatctctggtctggtgcaccccttttagctggatcaggagactgagctatagagaagttaagttactctttcaagaccacagtgcatttaaatagcaatgaacattatgatcttgtgtccttttattagtaatattgtgtaccagtgtttaatccctttaaccattggttttttcatctatatcattagaataaaactatcaaccttgtagggttgatcatattatctttcataccctttttttggttgaaaaattttagacccacagaaaggttgcaagaatgtttacaataaacattgtataccctttatagtataattctattattgctatttttgttgaataatttgagactaagttcctttatatcataacccttcatccctaaatatttgaatatgtgtctcctaaaaacaaggacaaattcaggaaatttgacatggtcacaatactgttatctatatatcatgactctaattgtggcccgtagtccaacacattgacattaactgggaatttgttagaattgaagactattgggctgaatcagaatctgcatttgaataagaacaccaggtgatttgtgtgtgtgtaaatgtttgagatgtactgctctaatggtagtccatatttatacttccccgttgtcaaatgacatttttaatagaaaaattgccccaatccaggatcatacattatatttaataattgccatgccttcttagtctactttaacttagaatagtttctcagacttagtctttcatgacattggcacttctgaagtgtacaggacaattgttttataaaataatcattactttgactcttcacaattagattcaagttacatatttttgggaggtacatagatgatgctgattgttctaagtgcatcacaacaagaggcacatgacatcagtttgttccattattggtgaaattgatcccttggttgggtgttactctggttatttatcagagcatagcacatcaccccaaaatttagtgttttgaaacaatcttgttattttcatgattatagagacaaattcaggcagggcagggcgagtttagcttgtctcttctccttgatgtctagagcttcagctgggaaattttgaatagctgtgggctggaatcatctggaggcttctgcactcacatctggtgcctaggctgggctgactcacaggctgggctcccctgggactgttgagcacggcacctatgtgtggcatcttcatgtagcttgagcttcctcacagacatggctgcctaagggctccaagtgagtgttccagcaaacaagctagagactgtagggcctttcatgattgagcatcagaagtcatatatagttcactttcacatcagctattgattgaagcagtcaggagcctgtgcagatttgggaaatctggggcagggagatagactccacctcttgacggaaagagtgtcagagaatttgtggccatgttttaaaattgccacaggtagtgactgctttatttcctaattgtaaatatagccattttctctttggaattaactgtaatctatcaggagacaccctgagaatatttaagaatcctgttccttggcatctttagccagttagttttagcattaattgttggctcctttatgtttattagttgggatttgaattacataaaaatctatgtgctaatcccccagtaactaaacgcgtaagaataacagatagtgctgggttcttaaaatcccttcttggacaaagataagcatgcatgacccaatttgacaggtgggccatgtcttactgatgatagtgccaaacaattattagcatgtcgacagtaatacagatgaaggcattctaccttcctgtgtgtgtggttctatgcctattatcctgactgttctctctcctttcagttaaggggatgtgcctgacagtgtgtcattacttcatttattatgattgcaaacatttatgtcaaagctggtccaaggcctaagtgaagtgatacccattgagagaactctccccctgtgcttttgagacatggctgctatgtctgagaggcagtgagttccaaaccaataggtcatccaagaatctaagcaggaacatttataccttttaaggtgcaggagcgaggtaaagattatgctttgtcgtcatatataagacttcttaaactgaattgtgcagttcacactgaaggagaggctggtgcctggcaccagtatgtgtgacctccacatagacttaagttgacaggagtgagagggggaacagtgtgctgtttgaaatgtttttaaaatgtattactgcagattttctaagcccttgtttagaaacatttcggttggatggtaagatctacctgtgtcctaatgtgtttagaaattgaatcttgcctcaaagtttagtcttaatagatatattaagttggtgtaaaagtaattgtaaaaaccacagttactgttgcatcaacccatatattgcagaggccacgtctcatgtataaccaggggctgaataaattctaggaacctgaggtccatatatagttgtattaaatatattgactgttttcttccttatgatgacaaaatgttttaagaaaagaaaaagaccctaaagaatagtcaccaaaattttgtagaaatgttcctttgtaggggatggtgggtatctgtctggttttttttttttttttaaaccttctttaaagagctgttttgtgtttgccaacatttctacaaggaatataatgtgtattatcacctttgtaacatgaataaattgtaatttgggaaaaaaatgtttatcaattaaagcaaagtgttcctataaattttagaaacagtaattcagtatgaaggctgatactaatctgccccccaccttcagggcagcctgtcctaaagtgccaccattgaccactttcaaaacatggatttactttaggcattttatttttattagagctgaaatgcaaatggaaaaaagaaagtattggattctctcttaaatatgtaagtcattcctgtaaacgtgtacttggaaaaggtttcagatgattctgataaatacatatacctgccttcaggggatgtgttcttcattgtgactaaaattcacacatttccttttggagaatgaagaggtccatggcttattttttctttctaggaaaagttatgcctgtaatcccagcactttgggaggctggggcaggtggatcatgagggcaggagatcgagaccatcctggctaacacggtgaaatgctgtctctactaaaaatacaaaaaattagccgggcatggtggcgggcgcctgtagtcccagctacttgggaggctgaggcaggagaatggcgtgaacccgggagacggagcttgcagtgagctgaggttgcgccactgcacttcaacctgggtgacagagcgagactccatctcaaaaaaaaggaaaagttactctagcctacccaaatgactaggggtcatggcttgtattccaaaagaaaaatagcattcacgttggaaatttcatgagatgatgagtcagttaattctaaatgtatttacttatactcagtttaaagtttcaccagtgtcatttaaggaagactcttttttatcagggttctcactagcccaggagaggaagtcctcttcttgggtatcctcaggactttgggactgccaattttacatttactactttttgatcttctgtgctgctagtggcacccagtgatttttaagggaaggcttgaggctctgaaagaagggtgaaaagagaggagaaaaggaacctcaaaagaagttgtaaccaacatcaaagaaggaggaagaagaggagaaaaaaaggaatgttgtgtatggactataccttatagttgacatagagtatattttattaatgttagtctaggcgtttattactgaaatgtaaactttttgtttgcatgtgagcaaaggacacattcaaaaaaggctttggctttttactcagcgaagagtatttgtagacatttgggttatgaaagtcaacattacagctatatttggggaagtgtattcttctgacttcagaaatcgtatgctgtgttttccaaatgtttgcaggtgcaaattgataaaactgcacctggagtgtttttaaaggtttgcaaaccagaaaacaacattttataattggggatatatgttcacaccgtgaacataacagtgatgcagctttggcttaatcaggagaggttcacctgatatagatggggagaaagtttacatagtgaaaatttctttaatgccatttggttctgagcgtattatcaaagttattattccttctgttggtctttgtgaaacactggaagaagcagggcactgatgttgcatccctagttagtggcactgaaaatgctatgggtgcaataggtagttctggaatgtgttgtactttataaagtctggttgataaagattgtcaatatgctgaaacctttaatgcaaaaaccaaagtctgctatgcatcactatttagcgtatagagtgctaccgaaatcaatatggtatgtcccactggaacttgggaaaggagtctaaaaatgtttcctgaaataaaacataaacaaaattagaaaaacagaaactctaccaatttgatatattgtagaaaagtacttttttcttcttttagttttagttgtaaacctaagttgaagttgttttttgaaaagcttatgctgagtcagggcctgagcctgtgggatgggtgaccactggcagggaaatatctcctgttcccttattccctctcttttctcctggctgcctttctctagtctcctgtgacatggtagagagggcctcatactgataggtagcagcaggactccaaacagggcccttcatttgctctaatgtcagcctcttgcgtctgtaatgcataggaaatcactatgaggaatttcagctattcagcaaaatctccccagaagaggaagtacatgcatgaggggtactttgttggaaagaaggggtcaaagccggcaagataggaagtagcagttggctgtgaggcctgttctgggagtaaggtctgactgccactgactagtggtatgaatatgagcaaatctttaaccacagggcctcagtttgctcaactgtgaaataatgggcttggcctaagggataactaggatactttccagctccaagattctgagttttagtgaaccagaacaaacgtgaaactgtagaatatttccagcctcaagcctgaacccgactggtattttactgtcagaccctgtcgtcaattctagttaaattttctagaaaagaccctcatttagtcatggtgattcaaggacagagagtcggaaaaggttttcattgctttctctctgtactgttcacgtggtagctactctgaggttaagtcgtaggtcgaagttcaggttgcctgggagtgaacctagtcaaacaaccccaaggtgatcagggtttgcttaaacctgtagactccaaagctcaaagttgtatttggccattttgtaactatgctcttttagaaagaagatcggacattttatttctgtccctcctttctatgttaacttaggagagcctgcgttgatttctagctgtcttctggaagtacctctgtctgcttatggataagtgtagttctgtgaaataagacatcagcacagaggacacactgtgaatggggcttggtatgactgggtgatgttggaggcaatggaacacattggtcaagacatgtacagtggagtgagggaagtgggttcaaatctttgtaagtcaagcacttggcataatgtcaggcatgtggcaagtacccaaaagttgcaactgttattatttgagatcataggaatatacaaacataatcttctatcataataaagaccagtgaacatgttagtagaaacatctttttaaaaaagaattactggagctggatgcagtgactcatacctgtaatcccagtgctttgagaggctggggtgggagggtcacttgagaccaggagtttgagattagcctgggtaacaaaacggaccctgtctctacaaaaacgttaaaaattacttggttgtggtggcacgcgcctaaagtcctaattacttaagaggctgagacaggaggattgcttgagctcaggagttcaaggctgcagcgacctgtgattgtgccactgcgctctatcttgggcaattagagcaagaccttgtctctgaaagaaaaaaaaaattgagggaaaaaatgcaaattgtttttttctctgttcttataacacaacaatcaacacagaaaacctttgtgtccagatgtgtgggggtttttcctacacaccaagcaagcagtcagctctgcagcaagcaccagctaggtgtcctcccattcagttccaacaccgtctacctggaggtagtgccagatgccacagattgagggcttagtccccaagactgcccccttttcagatgctggtcgcaggtccgggcctccagaaattctgactggcttccacttggggttcccacaacccctgctttggttttgattaatttgctggagtggctcacagagctcaaacacatttactgatttgttataagggacattgcatactttgggaagctgcagcaggcagatcacttgaggccaggagtttaagaccagcctgggcaacatggtgaaacctcatctctattaaaaaaaaaaaaaaaaaaaaaaccagctgggcgtggtggtacatgcctgtaatcccagctactcgggaggctgaggcaggagaatcgccttttatggagacttcattggatgggcatgattgatcatcaagcagaaatataattgtacaaaaagggtctgatctaatgctaatggactgaaagagaaacccagcaatgcctgactgttcagattcttcttggcctctctgtgcagcattccctcctccagaatatagagcgagatgccttccgaaatggaggtcttacgacctaaagtcagacaaggaaggtcagagaatttatttttttaatagaagattccaaaataaaatctctgattaaatttaagtcaaagcaacatcaaatcattatacatcaaataattcattccaaaactaaacaagtaaaactatgtttaccaggtatagacagtacctgataccccctcacttgtatcaaaggttgtgtgctactttttcttttaatataaataattaataggtaagccaggaaggccagctctttaatgcaggggaagatacctactttggggagagcagagagagattctgttttctgaggcctgcttccaaggcctaaagcatcccaacattataatgagagctgtgacagttatgagccagtaactatatatatatatatatatatatatatatatgtgtgtgtatgtaaaggaattcagggagaggaagtgtgatatcattacatagatagatactgtggacttaagtatttattaattcagttcaatcaaatgcagcaggtttaagttgtgtgctaaagcaaaatttgcagagaccatcttatatcctgttattggcaaagtatttctggcagaagtggtgtagtcatttccacatgtggtccctggtaacagagcatgaaggacttggggagggatttatataaatggctgagtcccatgagcataaacatccattgtgttgtgtctgaggaatctgtcactctgaacagcggtgccagacttctgtttgtgctggcactcttaggagacccgagtaagcaagcacttccttacctggcatgcctacgcgtggagtgttttttgtcattggattgtcagacttgagtttttcttatgttgtaaatacgtaggtgctgtgaagaaattttcaccctgtggggaaaaagttttgaatagatgtaatctcttgattctcaatattgcttaagatgagttcatctctcttagaacaaaggcaatgagaggtttgatgccaggaaagttgggagagctgggcaatcttagaaagagacctgggcactaagaggaatttgcatccaggcagtagttccagaattggcaaatcagtattatgtttgtgtatatattatatacacatcttggcaatgtagaacaagataagctacattttatcttctagaatttgatagccaaaatcacaggtcagaattttaaagtaaacagttttactatttcctcttcttgtagatctaaaaacagtgtccctttaagtcattcctggtgtttcagagagaccatcagagcatggctttgtatccacaaaaaaaaaaaaaaaggcttcagaactgggggcactggaagacaaagtaaatgcacataaaggtaatgcattctcagaacatgtagaaggggatggtgaatttatgtagctattccccattttactctttctaaacagatataagacagtactagctggtagtatttttccctaagaattaaatgttgtttgtttcataaacctataatatttttatagtttggcagcagtgactttggaatgaaagccaacttcagatgccaactctaccattttgaaaccgtggagacttgtgctaattgtttaatttttgagctttgtttatttgtaaaatgtgtggaacagtacttacctcaaaggctgttgagattattaaactgcttatgagaaagcttgctacctagtaggtgtttgttaaatgttaaatgtattcaatgaattaggaagtaatttatatccaaaatttcagtgctaaagtgcagaaataaatacaggaaacagttgtttgattccaggttacttgggaattttgaaaaggtgctccacttgttacttttctttagcctgttacttgatgtccttttccagagcactttagaataacttggctcagagcactgaatttggggaatattcaagactccaagaaattagtgccctctaaaatagcagttgagtggagtcatgaggtctgaattcatttttgtaattatttgctgttacaattatattatgaatacaaatagctactatttatttctggctactgtgtgccagggactgtactgaacactttataaacattatgtcacttaatccctgtagtacaggcattatggttctcattgtgcacatgagaaaatgagatacactgtgttaagaaataagtctggcccggcatgggcatggtggctcacacctgtaatcccagcactttaggtggcagaggcggacggatcacgaggtcaggagttagagaccagcctaaccaacatggtgaaaccccatctctactaaaaatacaaaaattaactgggcatggtggtgcgtgcctgtaatcccagctactcaggaggctgaggcaggagaatcgcttgaacccaggaggtggaggttgcagttagccaagccgagctgagccgagatcgcgccattgcactccagcctgggtgacagagtgagactccacctaaaaaaaaaaaaacaaaacaaaaaacaaaaaacgtctaacctaaccttccatagctgttaagatttaaaagccaggatagtgctgtctcagatgagcatctgtgatttgctacctgtgttaatcgggatgatagcttagctttctgaaatgctaatacaggttgagtatcccttaatggaaatgcttgggaccagaagtgttatgaatttcaattttttttgagctttgaatatttgcattatgtgtaatagttgagtatcccacatctgaaaatctgaaattcaaaatgctccaatgagcatttcctttgaatgtcatgtcagcgctcaaaagtttcagattttggagtgtttcagatttcagatttttggatttgggatattcagcctatacaacatagagcttattgagggtgtggtgtgtatttagaatctttgacatattttatacctcagggcttggcaaggttcaaggaattgattatatatgtacagtgacaaattttatgaaataatttttctggtgttttttttcccttcagcttttaagttctggggctacatgtacaggatttgcaggtttgttacatgaacgtgtggcatgctggtttgctgcacgtatcaacccatcacctaggtattaagcccagcatgcattagctattcttcctgatgctctccctccccctgccccgctgacaggccccagtgtgtgttcaccccaggtgtccatgggttctctttgttcagctcctacttataagtgagaacatgcgttttttgtttttttttttattcctgcattagtgtgctgaggataatggcttccagctccaaccatgtccctgcaaaggacaggatcttgttcctttttatgactgcatagtattctaatatatatacaccacattttctttatccagtctattattggtgggcatttgggttgattccatgtctttgctattgtgaataatgctgcagcaaacatactcgtgcgtgtatctttataacagaatgatttgcgttcctttgggtatatacccagtaatgggattgctgggtcaaatggtattaatatttctgtttctaaatcttggaggaatcaccacattgtcttccacagtggttgaactcatttacactcccattttctggtgttttgattttgacttttgttcatccaagataagtgtaaaatagctgtagaatacctatatctaaatcactgtttcttagtcttggctacacaaaagaatcacctgaggagctttaagatgtaaaccaaagaaaacaaaacagactccaaagcctgttactcattcccagatattctgatgtgagctaaacagtgccttaagtcttctggagaccaacccgggttggacccagccctgagatttggactgaggtgctgggaaggactgagatcagtcctctgcagggtctcattttgcttggtagtctggctctgcagtttggggttgcctccacacctcaccccccacaccctttccccaacaccctcacttcaaactggaggaaagaggtggggcagttttcagcatttgcgctgttccagtcagtatgatcctgtaagagggtctgtttggaaggttttcatctgtccatcaccagttgttgggatataactttttcattgctaatttatgctttggatatactggctgtgtgtatggtttggttttctattctggtgacatcctagaggcatctgccatatttgtaaacatcaaacatattagtaggtaagccagggagctgttttaaatgtcacaggtgccattttttttatttttccagtggagtcatatttcctggcttttcttctctccttcactgttatcggacttctcaatttaactgctctcctgttcccaccaccccacaaccttcttacatctgaacaatgacagatgacagtaaatccagctgtggataatagtccaggcagcagaggattttttaggcagataagtagtttgctattggccagagtggtctattggaacacagattttgtggaaacatggtgttggcaggttaccagttggagcaataaattaaattttcactagcacatatttgtctacagtaacttaaatcattttttaaaaatttcatttacacatgagggggcagtatgggactataaagcaaatgctgtctttgaagtagcttatttttattggtatataatagtttttaggtgcgaactttttgactgtgcaattaaaactccagcattgttgttagttgttcagcaatacacatatgtaagtgatataccctcacttgtatcgaaggttgtgtaccacttttaatataaaaaatataaaacagtgagacattctcacagtgctttttgtttttaaattatacatgtgcagaacgtgcaggttctgggatagatgtgcagaacgtgcagatttgttacataggtatacatgtgccatggtggtttgctgcatccatcaacccgccctctaggatttaagccccacatacattaggtatttgtgggttttatattcatgttttgtttaaagctggctggctttcttcctgttttctgcttccacctgaggaacgtcagccctttggagatgcagcttctattaggttgatatctctaatgtattttactttatgactttattgaagaatgaagggcctgcagcattgctggaaggaagcctctgaactggggtctcacagctatggagggtctattatcagtcacctctgtgtgatatgctttctttgtggcacaaattgcttttctcaaaagaagaaatttgctaagcaaaggagcagcacattttaattaatgttgttattactgatctgtgaatgacattatagatagatcaaggtgctaatattctaggtttcataaatgaaaggggaaataaaagaggggttagagggtattaaatgaattgataaaatccagaaaacattttatgaaaaatgtaaatgggaagctagaaaggtaatttcataagcataggctatttttaaatgtgtaaaaagtatttgcagtcatatgtttctgtttacgtagtttggaaaaaattgaggccaacgttttggtgtaaatataaccttccataaaatttaatggaatacttgtttttactgttttatcctggctgcctcctttggagatgaagggctgtggtactgtctatatctgctaaagatagttttatttgtttagttttggaatgaattatttgatatataacaatctgatgttgttttgatttaaatttaatcagagattttattttggaatcttctgttaaaaaaataaaaggctatgacctcttcccttcattggaaggaatggattttgggctctagcctgtcttgaatgaactccaaatcaaatgttgtggtgctggtttactggagtaacacacaggtttctgttcatggtaaataattcctgtcctttatgctttgttggaagatttttcggacgccgcccgatactacattccctgagcccacctgcctgtcagcatcacccccaaatgcgccaccaaggcagtcgaagagacaaggccagagaaccaagaggcccgtggccgtctacaatctttgtctggagctggaagatggtaagatgttaatgatattttttgcttgatagcatgttgagagtatggcgtatcatatgtcgtcagggcaggccacagttttctgtcatctgtgttttaatttcttcttcccttaagattataattttgagatttacagggagggtgaagcttttttgtaagggagaaaacgcaagtttcggttttgtgtttgtctttgttatgcatggttctttttttatttttaaaagacagcttaaatttcttttttgggagacttgtgtgacctcctgtgaggttacataaccctgagacaaatggaaggggaactaaaattaaagcagatcttttatgagaggagcggatggagtctcatgttaaatgcatctagattaaaggcacagttcaccatcgctctggggtttatggcttgtgtgccttacttgccccatttttctgacttgttcatcaggcagaatgcttcatcttatggcaggggtggcaggttgacctgcctacctgggccaggcttgtgggaactgggctgcagtggaactctggccagtggaagttctcacgtcccttccgagccatgctgttcagctaatcgttgccacgtggccctgttgtttcagtgttgccagattgcccagtttttacaaagcctagaaatctgagttttcaacactgatccatacaaaacaagactgggagctgtgcacacgcctcccattgctaatttgtaatcatatggttattggtgtggagaataagatgattctggtatccaaacctgcgttttcagtatgcagcctgaagctgtgactcgtgttgtgaggccttcctcttattgagaacatttgctgaatttgaaagtagtcttcattcttcttctagtcctctttttcaaaaaagagaatctttcatttattatccttgagctacccaggttaccttagttgggaagtgtgagattagcagagtgaggaaggggatgaggatggtgacagataccatgccttcatcataggcagctgcatgcacacaccaggtggttaatatccagagatccacgcaagcaggtgacaactgtcttcagcttacctgacttagaggtatctctaggaagactcggaatgcctcctgtaatgacacagggggactaaaatgtgggattcttttatattgcttaagacgtaggtacatatgatacaaatattagttttacaattggatagttaatttccagaggaagggcatgaatcattacaattaagctataatttcagaacttccttttagacactcatttcaacttctgatcctagctaacttttttattctgtctctttcttacgttcattctttctcagcagagttgttaataaggagtaaaactgactgttttgaattgcaccttctcttacacctcacttgtcctctgatggaagtgttaataaatagtgaaataagcaaatgttggaaagtaggaaaggaaaaagaaatcaagaagacacagaatacctcaaatggctcattggcccttgagcaaaatggaattgactgtatttcatgaggtagatgactaaagaaggacgttttggtcttaggatcacgtctactattttgatgttcttagcaatggaatcgtaatatccagtcaaatttatttagtggattaaccttttgatcattggattgctaagtgattattaatggtaagaagtttctgtagtggtatttagcatatctcttatgggaacactcaagctagtgtacaatcacagccttcctaacttgtaggtgataaaataattcgttaaaattacttgatttttaagggaaaggattgtcagctacttaacttctttagtctggtttttatgttcattatttgcatgatgttttgttctacattttgtatttcatgaagtattttatagctttatattcatccttggttgcaactttgggatttttttttttaagttgtcagaatcaggaaaactcttaagtttggtcatagtgatttaatcttatgttagaggttatatgataagataaagcaacttaaaactattattctcccttgccctcagttttttgtagttaagttttagttgtgtgaaaaaatagttatttcagagagaacagagtagggtctatattttgtcataggctttttatattttacatattctaaaaaaaaaagaaaagtgaatacatttatttgaaaggaagcatataggaaaagaatactaaaaaaactttcatgttattgaatgtcacttagcatattgaaaattttactgccagaagaagatgtattcttgtcattacgacttaattttttttaaagtagcttgaatcatataattgtcaaaacgacttgaaggtttcaaaaagtttaatttttttgtatttttttcttattttagtagtgaagtgacttcccatgttaatctagtttgtgttaaaatatgcattattatagacaactttggttgattatttttccaaatgttctagtttatatgggacagatagaaaatgtgtatacaaatatgcttctctcttccctgcccccgccccgtgactcattgtagtgtaagttaatttgaattaattaaatacaggatgaatagtttttgcttataagttaggtgtagactatctgccaagatttgaggaactggattggatgactggagatgttcttcaggcctatgatttggtcagagatttggtatttgagtgaagtggtttgtggtatgttatttcttcttctgcactgagtagagtatgaaactgtgtgatgtcccaaacagccagtcttggaacacactcggaattggtttcagttcagcatcaggcagatcaaaaaagcatcagcgaagagtcagcaagcctgttagcatgtgtcacagtaggatgggcctggatgcagaaaacccagcatgaagccggaggggagatcctctgctgggagacatgttttctgttatgttcattcaacctcacccccactcccaattgagagatgaccagtttaactaaataaaccgagtgtctttactttagtaaagacttccatcggcattggcgcatctagccatactgtgtatgctcattatttttctttgcaatatatgattaaatgatattaaatttatttgcaaaagactgtaaaattctagttacttgcttaagcttctttattgatgattaatatgaactaaaatggatatagtatctggctagttttcttaaattagagcagctgttaaatctttgtgagattctcatcttttattttgttgaagccatattgctcatttttcatataacatttaatctcaacatcaaagctgagtagatttggctaagtcagttatgaaaaagcaaaatatgacgtaggctgctaagtgctgaaaagattagaaatcaaaggtttgctttcatttcattttcaagttatatcccatgtttttatttctttagaactactagtaagataactctaaaaatgttaaatatatgttatgtgtttattttctcctgcccccactccaagtgcatgtccttacaatctcttacataaagaggggctgttgtgtttattgtaattcccccaaatacaaggaaagttcaggaggctatatgagatcaaagtgatctttgttatttttcattcaaggcagaagaaattttaagcaaaggtctggggagtcggggagaagaggattaccatctgaatctctttcttcatgctagttctaattttaaacaaaactagacatttacagaactaggttttatatgtatcttctggtgtaattaagtattctttgcctgtcttcttttgtaacatgatacagcagcttatttaggcaacttaaaaaaatatgacttatagtgagttgaaaacaaaatcatcttgcaagccaattggcaagatttaataacatttgagtgttggtcttacttgggtatcgtcgggttggcactttaacatttggatcacgaatgtgctaactgcagcacattttgttgagcatgtgttattgtagtcctacagcgtggtagataccgtgatgaggatacagagccttctcagcaaaaaaatgaaaatactactgttgagcggggcagagatggataaacaatgacacgtgatcatttccttgtatcctaagtaggaacatatcttgatctaggtgagtctctaaaatcagagtaggacaaatatgtcatatatagatgtcctttcagcctgagtaatatcaaattagaactttgaataattagctaaaatttaaatgtcacacgtcaacgagagcaatgctgatgatataaattagccgtcttaggtaggttgaaagaatttggtttgattttgaggcatgagcaagagaacagaaaactagaaagcaggccactgtgcggtctttttaaatgtagatttttaattctaaacgatggaatgctgttagccatttggaagttttttttgcctctaccatttattagtggtttttattatactagatatgaaaatcagaattatactgcatatcaattgaagagcttttatatgctccacatcctgccacatacggtttttcctttaaaggagctaattttctgttcccattctgtttgtcactgcagtgaaataagaaacaacgtggcagtaagtgcccagtgctagctctgaggaagggaagtctgtagggggtgctttctggtttccttgaaatgagctgtttcggcagttgggtgggaaagggtttcaggtaaggggagtagcgtgactgaggcatggcaggagcagagagccggagccaggtgtgagggtaggagattccctgattagaaggggacagtgttgacagttgtgaatgatgggcggaactgatgtgaaagacttagacccaggagagacagcttaagggacaaatgggtggattggagcctgggctggggaatatgtatcctgactgtatactcatggacaaattgcttaccctctctaaatctattttattagctacaaaatcagggtaataatagtatctaccactgaggatggttgagaaggttcagttgttaatgtgtttagcctaacgtctggcacatagtaagcactcgaactctagctgctgctgtagggtagtattcttaaagccagggaaaggtgctttaggtttaaaatgataagaggaaccactgaatatttttcagcaagggagaagagttgtaacattttgaaaataatacttaagaaacttaatctgacttaatctgccagtagaaatctgaaaggcagccatggtaaaaggctgatgaagtaatttaggctgaggttgaagtgggcttgaattagcactagaaagcaaaaataaaatggatatctgggagagatgttaaagcaaatcggggacttctcaactgactagatggagagatcaaggcagataaagtggacattattcgccacagattaggctcataggtaaatctatcattgtgtttatgtttttgtttttatcttcagttttttccttgcagcttaaaaacagaccatctttccatcaaaaggaaggaaacatgccattttgttagtgtgttcaatacgtattcttatgcgtaactgctttgaaaaataggtttagtaaaaaatggtgtagaatgtcttggtataaatagtgtatatggaaatagtgtatatgggaaagtcagtagaaagagagaaatagtaaatagttactaaaatattccatgtgcttagaaaaagaacagtcctataactatgagcaaagtacagctcatttttctccaatttttcctcacaggcacatatatccacgttcatccataggctcatattaagggatgggaggccactcactctagtgagacccttcattagaagccaaggatagctcacattcacggcagcggtgcactctgtaatctcagctcccaagagagcatctatagaatgcctctttatgaaaatgtgctttcataagtgaattgtaactactctgtctttcccacgatgttagcaggacacaaactatgtggaggtgtgagaaggacaactggaaaaccattgttggcatggattttcgttgacattctgtagctatagatgtttccttgtaaacatgtgatcagcttgatgcagattataatcaatccaggtaactggactaagcagacctttgcattaagatgggcagtctgtcttttctccatgcttaccaatttttttttggcatggcatttcatgggtgggctctggataataacttcccaagcccagaagccctttgccatctcctcacagcagtgttatgattccttgacatggaattactgtgttgtgaagtttaatctaagaccaggcttgaatgtgtgacagtatatgtagacagattatttcttaactcacttttacaatgatgagatcaatgggttggaaaaggcagccagaagattcagggctgtaattgagttgtggcgtgcctagaaattatgtgggatgcctcccctgcgttggtgtctccccagaaacctcccgtgaggctcagcatccccccccccaccaaccccaatgctagtgacaaagtgaaaggcaacttcttctattgcttcctatgtaattttaactgtgcttctgtgtgggatgaacatttccccctttctgtggaggaggaaaaaaaaaaagcttatttaatgcctttaaaaaaaatacatagctgcttctgtggtgaaaataagttcatggcaggtaactcagatttatagaagagagaaaaattctttaaagcttctctccctgtggagtgggttttttctccacttctaatagcttttattttaatttctagttctgaattcaagcagctgtcactctctttatagccccctttgaaactcttgtggcgtaggaggtagctgggctgtctaagaaacatcttttcaaaccaaccaaagtattgtttatcctgaatgaaatggaattttaaggctgtcaagagtgactgatttgaaacgttttctttgatagccaggaagatgagcagaaatcttgagggagaaggtatttctctgtgtaaccaattccaagtgacttctgttgctctgaaaactctatggcccatgattaaaatgaccatgatctaagagtgttgtgtacaattaatagaacaaagccaacctgtggccagttcatttttacttactgaattcttaccagctgttgaggaaaaagaaatgatgcaagactgaggcaatgccagagaacactccttgtatttatcatcagttgtcttcagttggcttttcttagttctgggttgcatctttgcagcctggttccctctgcatgctcattctaccttcctttgtgccctcctaggctgtattaagaagcagtacagggtcacctttagatgaaagaaaaaaaagaaaaaaaaaaaccatttaagcctattaaaatgaaatttggggccaggcctagtggctcactcctataatcccagcatgttgggtggccgaggtgggaggatcagctgggcctgggaagttgaggctgcagcgagccgtgattataccactgcactccagcctgggtgacagatcaagaccccatctccaacaacaacaacaaaaaaatgaattttgagactggcattttggatctactaatagtctttaaaatcagcagcacaagtttttgagcatgaaatgtgcttatggtaatgatttttatttttaaagagaaatagtgattatttaagtctgtttattatcttggctattttttaaaaggtatattctttttcttaaaatctttagtagttcatgcaggagtatgatacaaaattcagagagtaataactttgaacagttatgtattagcatattatataccaagtactgttattggcaatatttattaaacttagataatatccagaacaatcctataggtagtattattatccctattttatagttcaggaaactgaggcatagagaaggccaataactcacccacatctgtgacaaagctaggatggaacccaggcagtctgattccagggtctgggttcttaatcactctactagagtgctgaacataagggcaactgtgaacttctcttccctggagtcaacagacattgccatttgtcttgtggttcctttcagagttactctgtgcatttctaacaatgctatttattttttaattttaagaatgattcttagtttttccatttaaaaaacaaatgtttagtgttgtaagggagtcacagctgtggtcttgatccaggagataaaggagaaggaagagccagagaggactatggttttcaatgtgggacataaaacactgtaacaagcatgggccctccaggagaaaaatccaggcctgtttttttatgagagaaaggggagggaagtgacccattttatttcagtgatattaagtactgcaaaagcattttattgtaatttatgccaccacttacctaaatgaacaaacatctggtcatggattggttgtagtgaggatatctcaggtaccttatgctttaacaggctgttagaaagtgaacacaatttggaatttgatgctgcccaaatatatgagattttgctgttgcttttctgttttctcctcccactcctctccccttctttctttattaaaaataatttaaaaaataaataatatattaccatatatgaaaactcaaaaagtataaaaagatacaaagtggaaagatctattccatcccattgactcagtgcctgcgtctgcaagccagatctgtagccattgatgttcatgggttgaaccacataaaattgccatcttttaggtaaaaaattatctaatattggcaatttcaactgtcccccccccccccccccccatattgtaggccaaacgttgtaatcattgagaatttcatgtagttcaacttgtggtttctcaaatccttctagagttgagatgtaaattggattgatgatcagttattagcaagtctgtaccttgtgaaactgctgtaggtatatgccaaacatgattgaatatcatcatttttatatggttcaacctatagtttcctgtccttctagaattctttatttttatatataagtgtattagggtgctctaaagagatagaatgaataagatagatgtatatattgaaggggagtttattaaggagtattgactcacatgatcacaaggtgaagtcccacaataggccatctgcaagctgaggagcagggaagctagtccaagtcccaaaacctcaaaagtagggaagctgacagtgcagccttcagtcggtgaccaaaagcccgaaagcccactggtgtaagtccaggagtccaaatctgaagaacttggactctcatgttcgagggcaggaaacatccagcttgggagaaagatgacggctgtggaagattcagcaagtcaagtcctccaccttcttctgcctgctttattccagctgctctggcagctgattaggtgttaatctcctttggcaacaccctcaccgacacacccaggaacaatactttgcatccttcaatccaatcatgttaacactcaatattaaccaccacaataagcaaatatgaatatggattcttatttattctcttcttcactgaagagtcagtttggtaccttttttgtttttttcaaattttatagtatatcttgtgttgctttttatgtcagtacaaagagagctttctcctttcttcactgctgtatagtactctctgcattctattgtatggatgtacttataagaggaccttgtattctacagcccagccaaacacagtcagatgatgcagatgtcttactcatcacacataggcttccagccatcctgggatgataaagatttgtccatagaaataatgtacagtatgcttttgaatgaaaaaagcaagttttaagatggaattttcaaaaatattctcacttttaaaggaaaacctatatatttaaatataagcatacaagtaaatctggaaaaataatcagttataacaatggttatccttaggtggttagagttggtgattttctttatacatatttgtatttcctatcttgtctatagtgtattacttgtaatacatacatataaatacacatatacacacataccgcatacatttatatgtgtttagtttacaaatgtttcagcttaactccgaagcaagctgtgtttcatactagtgtgttgggtatatgtttaatattttgtaatggaaggactgagaaacagagtctagaaagaaagggaatggagtccctttagcatgagctggcctggagagacttcattggcactaactgagaatgactgtctctcactgcttagtgttttcctgttagacttcacgtgactttcaccttttgcccaggctgctttctcatggttacgttgtcccggcgttttggggatccctattactggaaatacttaggcagcaaagagttttattgaatggttgacttgcttgtaacggttaagtttggatttaaatttcttccctcctcttgatgttgtttatgatctcagcaaatctctctctaagcctcacaaatttggacaataaaactttgacatggtttttgcctggaacaactgagttaatggatgtaaaccagccaatatatggtaaatattgaatagttttcgcttatattttcttgagagcctgatatctgaagcagaagagcttcagatacgctttcatgtttggtatgctttcaaataaaatgtaatttagtcttttatttctggttatttttgtccaacattatacctaagtttgttggtaactagcatctccctctggcaattacttatttatttttttgagaccatttcgctcttgttgcccaggctagagtgcgatggcgcgatcttggctcactgcaatctctgcctcccaggttcaagtgattctcctgcctcagcttcctgagtagctgggattacaggcccctgccaccactcccggctaatttttttttttttttttgtatttttagtagagacaggtttcaccctgttggccaggctggtcttgagctcctgacctcaggtggtccacacacttcggcctcccagagtgccgggattacaggtgtgagccactgccctggcctccatctggcaattaataatgaactttccttcttcttagatgagaggaataggggaggacaggtgaaaagcaaggagtctggcaatcctcattgtctcagctgtactggaggttgtactctgagcacagtgctctaaatttcctgagctgtcaaactggcagcttcctcaaagtttatggaagacagtttaagtatctgagtagttttgggttcccaagaataataacacatggctgttatattttttgtttatatgggcaaaaattttagtctttaaacaatgccccaggactgtgattatgacataaaaatgctctttgctttgtagagtaaagcaatttgctttgacttctattgacattgcaactgaactggtcttacttgctttataattgaattgctgcagatttccatcgacctttgcaagaggtagaggtggttcctggagttgtaacctgatgcctattagctgttgctataactttataatggggtctttattttttgtcatgtgattggttttaacagctgattctctcatcagcttttcctggcatgtacttttggcatattttagctgtcatagtagctttttgggcaagcattatgcttaatttctttaaatctttgggcaacagaaaataaaatgtacttattaagtttatggcaatttcattacatcttttcatgccttaatgtgacattttaatttatagttcaggagttgcctttttagttttggggggaatgcagagctgtatgtagttttgtttctgtgcttttgggattgtggagtaggaagctcttttcttgagaagtcacatttttctttttctagagagaatttcagatacattatattagccaagtgaattattatctagcaactgactgtcattcatctgtacattatttggcttcattatagttcccattttgtcttgccatgtttcagagggaaaatgaaacgggaggagtgaggtcgttctgccccttaccctggatggcattacttgagcttgcagtgtaactgagaattggactaagtggaattttaggaagctctaccatgcggcagttataacctgcatctcagtgcacctgcccgtgctgagaaacacagttagcttctttccttaatgggcagttggcagggttaatgtcttaatctttctccctttttccccctaatgtaagacttaaggaagattttctgatcaaagaatctggacttttttctagcagtaatcatgcaatacttactactctatggacagtaaagaagaatttcctttggatggtagggtagagttgattttcttttttaaaaaagatatctctaggttcacagtttttaaaaggtttcattttaatgtcaaacttagtattccgtaacctatctttactattctaatttgtttaataaaggagctgcctctgtgtgtgtgtgtgtgtgtgtgtgtgtgtgtgtgtgtgtatacttttccagttaaggaaaactaatgtataagataatatgatataattccgtgacctaggttttatagaggatgagaataaatacctgggctgaaaaatatctcaattttaatttttatcttgctttggactgtttctttctgtagatcttatctgtttggtgcctctgttgatagtgcttcatgaagaaaattatctcactcagttccttagccatttcagttgaatttgtgatatgatttggtgtgtccccgcccagatctcatcttgaattgtagttcctataatccccacgtgtcgtgggaaggacccagtgggaggtagttgaatcgtgggagcagttacctccatgttgttattgtgatagtgagtgacttctcacgagatctgatggttttataagggggctttccccttttgcttggcacttctccttcctgccatcatgtgtagaaggatgtgtttgcctccccttctgccatgattgtaagtttcctgaggccttccagccatactgaactatgagtcaattaaacctctttcctttataaattacccagtctcaggtatgtctttattagcagcctaagaatggactgatacaagttgactagcatacggatagatggagagggagtgccaggttttctttggcttgttaggggttgattgggttttggacctgactttgacccttctcagccatgctgctcagactgctctgtgtgtactggtcattccatgtatagattacaacttctaggtagatgaggtcctggaacaccatgacattttggtccagccaagcatctgggtaagctgtgaagaaacaaggctgttcagttttcttcaaaaactgaggaatgagctacttggaaaaaaaacagtcttagataatccagctaggtgagataggtggtttttctgtgttctttggtcatgatctttttcagtttccctcagtcttatggtaactttggggatctggtcacccagtttctgaaagctaataattattggagtactagtgacaagatgcaaaatcaaaattttggacaaaactgtaatcctgcctttggggcagtaagaaatcataagctgttctggaagtcatgctcctttcctcagaattggaagtcttgaatgttccactgtccatgacaaactgctgccccagtagtttcaaaacaagtggatgttatgatgtacttctaagtcttgggtagggaggaagaggctgtggacaactaaagcatctttggatgtccttgttaaaacagaatgccatacaagatgagtcattgttctgatccaatatgacagtctgagatgtctctttttgcagggagtaagtaggatactttgacctgtatgtaccacatttgaggaaacagtatggtgcactctactcttcccaggcactagatcattaaagaatggatgttggccgggcacggtggctcacacctgtaatcccaaccctttgggaggccaaggcaggggcggatcatgaggtcaggagattgagatcatcctggccaacatggtgaaaccccttctctattgaaaatacaaaaattagctgggtgtggtggcgtgtgcctgtaatcccagctacttgggatgctgaggtacgagaatcgcttgaacccaggaggtggaggttgcagtgagccaagatcacgccactgctctccagcctggtgacagggtgagactccgtctcaaaaaaaaaaaaaaagaaaagaatggatgtcagctatatcctttgatctctgtcaatcttaaaattcaattgttggttccatctcatatgctggctgaagcttttcaccagctcctagacagatttaactttatttatataggtcacctctggattcattgttaagaattaggttttatttacaacatcaagtccaaaaacatttgaactggggtaggaaaatacaaattttggtttattttagttttcactattcagtgtagcattaggtactactttttgacatggtatagcaacccagactttattttagcagagtagaaattatgctagaatatatatgaaatgagtttggcagttctgtttcttggtactagataccactctccttttcagtggcctgaatgtcctgggtaacattaggaggaaaggctgccatggttaggagattttattgtcatagtatttgccatgtggtagaaattaggacatgactatctcatgcttagttcaaagattatgttttaaacaggcttatactaattagccaaacaaaactctcatcctactgcaacattttataatcccccccatttcaggttcttcctgtagattttcttctcagagctgttagtctgccactgtgacttttacccagaggtgttgattcttgagggtatcctttctcctcccctacctcctgaaccctcgtcttccaatacagacattcagccacattgtggttgctttagtcctccttgggtacagcatcattagaagagacacatcatttgggcagagaagccactgaaatactcaaagcaagagattattggttttgattgggtggccctatttaaaagatagaaaatgcagggtgacaggaggatgaattcaggcacaaggggatataggggcatgaggtggatgttaattggagcagttgtgctcaccctccgctggtgaaagagttcatttaattttggttgaagtctgtttttcccttaatgaattttgatacaattgctgccttctcttcaaagaagcaaatgttcttctgctttttaaaatgacagttttttttgtttctaaagtggtgcctttgttttgaaacttagtgttatttctctgttactttcttaaactatatttctctccccacttccaataagacaaataatttaatgggctatcaactccctctgatctacccacccccaccatgttggtattttccagaatttcagttctggattattttggttatgttattttccttttcttttgtcttagattttttaaaagacaacaatggacatgatcaagttagctgaacatcttatattgcttcttttatttaaatacttaaggaatttctctgagagtgttatcagtatagttcttcgtgtggccatcctttggggatttttatatctggtaatagttttattatgccctcacatttgaaggcagtttgaatatataattctctgctcaaattttttttctttaatactttaagaatactacttcaatttttttttttttttttttttttttttttgagatagagtctcactctgtagcctataccattacaggcacccaccaccacgcctggctaatttttttttctttgtatttttagtaaagacgaggtttcactgtgttggccaggctgatctcgaattctggacctccagtgatctgcccacctctacctcccaaagtgctgggattacaggtgtgagtcaccacacccggcctaggatactacttcaatttccttctgcacttagcattgctgttgagaagtctgatgccaatctgattctttttctttttatatgatctgctttttccatatgggtgcttttttctttgtatttgatattattaaatgttaaaataatatgtcttacgtgcaggattttccttactcctctgtttggcactctcagtcctttataattgaggtctttgatgtttctttaattttgagactttgattattatttaaatatttcctcctctgaatttgtttctgggatctagattctggcaatttcacttctattctctatattacaaatctctaaatctctgagttttcttattcattgagtttgctgtcttagttttctgtttttagaagttctcatttacaagtccatggtgaaggaggatttttttgtgtgtatgcatggttagggtgtgttggatccatcttctcccctttcttttcactgtctggctattgcctccactggggtcacctaggtgctggttcagagccaggtctattattgccagcacaatgttcttgtccttgggataggccaaatcatcccccaggcaagtggggaacttggttataggttcttggcctccatctagggtggagggcttctcccagtccctatttccacatgaagagcctggctgtagcccctctgccccatgcttggtatattattatagatactaggaaccctacaggtttttttgttttttgttttttgttttgagacagggtcttgctctgttgcccaggctggagtacagtcatgcgatctcagctcactgcagcctccacctcctgggttcaagcgattctcctgcctcaacctcctgagtagctgggattacaggcgtgcaccaccacacctggctattttttgtatttttcgtagagactgggttttgccatgttggctaggctggtctcaaactcctggcctcaggtgatccacctgcctcggcctcccaaagtgctgggattacagacatgagctgcagcgcctggccagaaccctgcagggtttaaatgtctaggtggttctgttggtttcagttggtcttggaaccataaacctttggctaatggtccctctggttgtttcttttttgtttctgttcgacagaaatgtgtaacaagtttatcagggaagttatgtatttttatttattaaaaaagatttggggggggttatttggtgtatgtgtgagggagaggtaggtttctccttaatattccgtcttggctgaacattttctgaatgaactttatcacaagagtgtttctgtgttataattgcagttactttgttctcagcaaaactttcttttgatcctattaactacttgttaattagaagtaactaagtttattctgatctgacaggaagagtatttgtataccaaagtaggtttcagcgtcccccagctagccaaatgcatgactgtgaggtttgcttaaattaaattcaactaatatattagatcttttctttttatgcatttttctttcctcttttctgtcttctccttttcttccttactcctgctaatacataagctagatgtttaagaatgaggagcatgggatagctttgctgatgtgggaatggtccatctgtgaggaataacagaaactgtctgtgattttataccatgcccaaaaaatcttcagctacgtggaagaacagcagggaagggatttcaggggggaactatctctgacgtaactgttaggaaatatatttgaaaggagacaaagaagaaatgaatgaaatggcagggaagcccaaagctttattccttccaacaatccaaaagcagttctgttcaagtgaaatgaccagaaaatgaatgaagagaacagtttgtcatcatcacaacaaaaagttaaactacctgaagtgtaaaagcttatcattagattaaaataagatataaacatcctctaaattattagaaatggtagaattatcaagctcttgtttcctcctcttggtctaattttctgccaatctttgaagatgattttagtctgtcctgaaaataaagcacttgttcatgtgctcaggctcataaaaaatcagattaagtgaaatgtggtagctatcaccaaagacatgtcctcttgaccaattgtggtcagtttttatgagaattgatgtttgttcaggaatcctaaatatttgcaaaagaacactgtgttgtatttaaaacaacaaaacaacaacaatattgctttaaagaaaagccagctctcttggccgggagatccctcaacgttcttttacttttccgcatcttcttccttgctctctccatccagtgctgtgacttcaactctctgtgcgtgactttcagatcaataaaactatcccaggcttctcttctgagctctagggttgtataagcaactctcccttagatactgccacgtggattttttattgacaccccaaacccaacatgcctacaaccggtcttattatctccctcacccagtatgctccttgtttttttattccctatttcagttaatgattctaccatacacccagttcctaagccatgaacctgaggctcatcttaagtttctctctcacccttcacctttgttcactgagttctaatgactgtcataactgaatatcttttgaagctgttctccagatcgtatcacttccctgcttaatccctgcaataccttcccagtgtctgcagagtaaattcatatgcctttacattagatacaaagttctttaccctacatcatgcacctgctttctgcatttgaccctgttctccaacaaaatccaacaactactgtggctctgaaaatggccacatgctctcctgtttcttttctttcagttttgatactttctcgaccagaggctttttccttgaaactggcaataatttcttccctttcctgttgctgcactcccacctgtctttcgctcctgacactggtaactctgaaaactcctttttctgggtctgaaagctccttgacataaccatattacagcaaacaccaccttgtttgtctttgcctgtcttctgcattatactctgggcatctttgggttagggactgcttgtctgcctgtataattcagcatctgtggtatgcctttgtacataaggagaagctcagtaaatgctagttgggtgaataaagtggattagagatgcttgtggctcaaaacgggagaggatgagaatccaaaactgtgtgcaggttttgtaagaatatgttggggtcttcagattttttttccctcctcaatttgtagaggcagtggctctccatgctgatgctatttcttgtggcagtggcagtcctgatgactcctggattgcctggcactgctttgtgttctctaaggcttcccaagaccaagacgtggtctgcaccctgacaaaatgtacaagggaaatgggcacctaaaaccaggttataaaaccagtatatgatggcgaaatgcaaaattgatggctgcagacagctctgagaaaggagaaaagaatcaggagaggaggggtttggcaagtaccttgtgggagttaaatctgaggatgctgcaaggaagtcattttctcttctaatcggcggtagttcattttccagagtgtcttagagtctgttcataaatcctttggtaccatttttgttcactcactggaacaacctttttacccagaggtgatttgtctgtttgtagatgcctgttaaagggtaacacctaagggaagagattgtgtgatcactcagaagaaatgataggtgaaaaataatgagtgtatctgactttaattctcaattttaagttagctttgtgggatttaaaatctttattcccagccaggggtggtggctcatacttgtaatccgaacactttgagaagtcaagacaggagaatcacttgaacctagaagtccgagaccaagctggacaacatagggagaccctctctctaatatatatatatatatatatatatatatatatatatattttaggtgtataaatatagatatgtaagtatataggaaaaatgtataaggaaaaatgtatatgcatttttcatatatatatgtgtatatatatgtatatatgtatatatatgtgtatatatatgtatatatatatgtatatatatatgcattcattccagaagttgttgaacatagaatattttttaagttttattattttcatagtagttaaaaaatgctaatttgatttttggttaactaaagtttcagaaatggttgtgagtatttaatgtttgtgtacctgatgatttattctccctcaaattcagtgattctctcaagtaggtaagctcattcctgaacagtgaaggaggaaggaactctatacacttggaaagtagggtgaagtgtcttctcctttgatcaggctgtgtcaacattcccttctaccaatgttattttcacttgagggttcaaattgccactgtttggcaggaaggaagagagaactctcttaatagaatgtgatttaatatgttgaatgacaatttgtgctgtgtcagtctgcttgggaaaaggattagaggcagtgtaaatgatctgctctatctggttgtaaaaacatttcaggcatctttcaaaagtaacattaaacccctggtctccagttccccaaagttgcttctcattgacaggtttctctcggtaggagtaagtcagggaataaaccggtcccagactctcctttgctgcttctgccatgtcatgccttgcccaactgtcagggcacacagcccagggaggactgagggcctgggtccagcctcctgcagccagggagctgctggcatctgacttgctgtgaaggtgatcctgttctgcttcagaactgatgacagtttgctatgtctagctgagcactgagggcagccgtcatgccaggtcaatgttcaggtttactctggactccgttctggggttccatttgagattctcttaattttgaggggagtcattgctcatgatgaatgaaagacacagggaggggctggggaaagctggaggccagcccctcgcgtcacttgggctctttcacagaaaagaactggacggagttgagctcgctgggcacaggggatgatgtggtctttgttccaaagtggatggatcccagaaagaaaatacattaaaaggaaatcatagcagtggtctaccagtgggttttggtccatttgcctgaaaattggcccttctattggcgctgagtttctccaattagctaaacgttttttgtggtgaagcgctgtggaaaaagtggcttcactgaaagagcaatcatagtcttctagactttataaatagactcagacaagaagaactgccctgtggagatacggttcatctcttgctcagccatctcccccaccctccccgggaacacacttatgaaataaagagctcagaaaactcttccttggagtttcagtggtacagttggttagtgtgcagcacttaaacagaaacctcttcttaacagaatgttctgcacagtgtcctccaggggtccccctcaatactcaccataaacaatttcttcttccagccatcaccaccatctctaactcctgcttgtctggattcagttgttctagatctccatttctgagattttctctcttaacccttagttgtaagctgggtcaggagtcaataataattattttgtacaatcagttttcaagattcccctggagtctggggagctagcttaatcagagcctggaatttctcttatgcttcgtttttaggagaattgaaatccatctggctgggtgcagtggctcacgcctgtaatcccagcaatttgggaggctgaggcaggcggatcacctgaggtcaggagttcgagaccagccttaacatgaagaaaccctgtcgctactaaaaatacaaaattagccgggcgtggtggtgcatgcctgtaatcccaactactcgggaggctgaggcaggagaactgcttgaacctgggaggcggagcttgcggtgagccgagatcgcgccattgcactccagcctgggcagcaagaacgaaactccatctcaaaaaaaaaaaaaaaaaaaaaaaaaagaaatccatctaagatgttttttgagagcaaggtccttgctgttgctggtgttcttgcttgctttgtttctaggacctgggagtgaggaaacgtgaagctttaatcagctacaagctgttgggggctggggttatggacctctatgtgtgtcacatttgcttccatagcagtttaggaccatcacctataaaattaaggccaagtcagtgccatctttgtagaacattgctgcctctgcagggttgcctggagcagttaaaatttaatggggactgaggattaggccaaagggccaagccttgatgggtgcagatcaggtgcattttatggtagctgggaggactgtgaaagcaagaagaccaatagagggaaataactgctcttgtgagctctcttgtccgtcttctgcattttctacccaagcccacaatgtatacaaatattatactaaacatatttaataaaatggtcccctgtgaatggatacattgtgcaactcatttaaaaaaaaatttagctttggtttaaattcatcgtgtggcattaccacaaaagcctaactctcttgtagtaccctccctgatatccaaagggaaatggaagtttgtctatgtgtgggattttaatgttggggtattagaaattataatccaagataccagctcagtaagacaagtcccttttagagttgtctaatttattatgcactaaatggcaactgagaatgacttaaagaaccaataggtgaccagaaaggaagaggttggaccccacagggctggtgtgctgcttggagctattcttgatttcattggtttatacctggactccgtatagtgaggaagtcattgtggctgccattatgccttttatcttccattatctgattttgatcattgtgttttcttgtaaggaaaacattcctcgctgtgtattatctgtggtttattttaagcatctttgattaaaaaaaatgtaaagacaggacacccagatactgtcaggctgaactgtaaatgtaattttatcatttgattgactaatcaagtaacaccatataattattagtggagttttttcttctccaggtatttgtttgatattcaatgctttttttcctcctaggtgacaatccttacccttccaaggaggacacccctaccagcagtctggactcactttcctccccgtctcccgtgactacagctgtccctgggcctcctggaccagacaaaaaccaccttctggcagatggagggagctttggagactgggcatccactatgtaagtaaccgtgcttctgttgggtgctgaagggtggaagccctgactttgttcattttaaagtttccatgagcagtgacctgtgggtgctgaagccattagatctaggagcccttgttttcttatcagaagggccaccaaagggagaagggtccttaaaacagagccttccttgaatactgtctgtgtttctagtatggaaggggtagctggatgctatgtcaaatctgatcgaagttcaattcctgggcagttttggattctgcaacggaaatttgttactgtcccacccaagatgtttccccactagttatgcaaactttagagatgtgagaatgcatgctgatggacagactcttgaaactgtctgtagaatgatattttacttacatgaatttctgagagcattatgctagcattctgctctgttttgctccatagcatcctgcagagttgagacttgatggttgacatttgattttatcttctcagtttggtttagtgccaggcatgtgcagatcagctcaagtatattaggacaaataatattaatacaaataaagtaccttgaacctgtgagggcttgtctggctgtgttgaccaaggctgtggagtaaaggcaggatggtggtgatgtggaacccaaaagggcatcacgtttcaaacaagtgctcagagaagagaaaactccaataataattacaaggcaatacttgattagtcaatcaaattttatctaaaaatacatttataattcatccagagaatctttttttttcttttttttaaagatggagttttgcttttgttgcccagggtggagtgcagtggtaccatcttggttcactgcaacctccgcctcctgggtttaagtgattctcctgcctcagcctcccaagtagctgggattacaggtgtctgccaccacagccagctaatttttatagttttagtagagacggggtttcaccatgttggccaggctggtctcagactcctgacctcaagtgatccacccgccttggcctcccatagtgctgggattacaggtgtgaaccaccatgcccagcccatccagagagtcttcaaaaaattttgttgaagccaaagttgcttaaaataaattatagataatggtgtcatctgaccctagctgggcattctggggactttaaatggactggaaagtgttcctcagattacgtggctttttatagttactgctggattcacatgaaatgattgtgaacttattaagtattaagagaggctgggagacatttggtatgccaaaatttgggggtgatctgaagactttgaaaatctgagactccaagtatggaaacacattctccagatgagatttttcctgccagtgttttcatctgtgcatattttttatgctgaggattgtggatttaaatcctacattactaggtatgcttgtcacctttactcttccttttccacaataaaaattctgtttcaccgtagtactacaagcaacaataacagtagttacctaggcacgcagaatctataatcctggttacactcgaggtggaatttagcatgtgtgtatgttttagtgaaaaccagatctctaattatgcctttcagtaagtgaatatcacaggcagtggagtgcagtttaagcagtcatctttcttctgtagcagttctgcagaaaactgacattatgagccacggtacagccaacactcaattcacaacacgtccatgcctgaaacaagaagggcttgatatttttggtcataaatcaaatgaggagtgaattccccagcttcctattcatacgcattttaaaatgtcatgaaaagcactccaaccttgagaggccaaaaagggggttggggggagtagttgaagcaagcctggaaaggagattttttttttttttttaatggagactttcttctatttcagaaacttgatttatttttttctgtgccatggatggaatacatctatgtttctctgaagtatatactaaaatgtttcttatgtatcttttaaaggatttactgatgagtgtgtatcagtccagatttgtcattatgttaggaagtttgtatatagatgagtgcctcttggacttgagtatgcaccagaacctcctgtaggtctcactgagacccacactgctggccccaccctggagctgaggattctgtaggtccgagaagggtcctgagagcttgccattctaaggagttcccaggtgacgatgaatgagccttgatatggaagaccatcccctgctccttgcctgcctccagggctgtgctgagtataagctgcttctctgaggagcgtaattaggataagtgattgctccacctcttttgtgtaaaacacactcttctagggtcgtgcgttgctgtcctcccagtagccggtgtgtgcttcccacatggtctggttctctttgcctcaaatatctgtcctgcttttttgctcaagccaatcctgacctatcttaacggtctaatttaatcttcacctccgggaagtcttccccatgctgtaatctacagggagcctctaaagagattccttgtccgtatttctgctgatacttattatttggcgctaagaaattcaagttgcctttgagtgttctttaatatttgccttttagtattatttgatatttatatggaataaatgtttctacctatctagctaatctttcccttaccccaagctagatcataaaattgttttttttgtttgtttgtttgtttgttttttttgggtgggggggcggggggcggggggcggggggtggtggtggcggtgggagggtggtgaatactgagtctcactctgtcacccaggctggagtgtggtggcatgatctcggctcactgcaacctccgcttcctgggttcaagtgattctggtgcctcaacctccccagtagctgggattacaggcacgtgccaccgcactggctacttttcatatttttggtagagatggggtttcctcatgttggtgaggctggtttcaaactcctgacctcaagtgatccgcctgccttggcttcccaaaatgctgggattacaggcgtgagctaccgtgccctgccataaccttgttaatgataggaattagatcttatattctttgaacttttttgtgatattgatgtaattattagtgaacatttaatttcttattttaatgatgtatttatagaaatgctgccttttggaaatctcatttctttctctgtgttactgaatgtctcttaggctactacatttggtttcttactcatcatcatcttttttttttttttttttttttttttaagatgtagtctcgctctgttgcccaggctggagtgcagtggtgccatctcagctcactgcaagctccgcctcctgggttcacgctattctcctgcctcagcctcccgagtggctggttctacaggcgcccaccaccacgcctggctaattttttgtgtttttagtagagacggggtttcactgcgttagccaggatggtctcgatctcctgacctcgtgatccacccacctcggcctcccaaagtgctgggattacaggtgtgagccaccgtgcccggttgattcatcttctttcttataaagattacaaactcttcctctaggaattccacacaattaatcttaccatttgctccttactgtgttttgtttccttagcatttataagttctcattgtatgttctcttcttgtcttttccccctttatctctgcataccagctatacagtattaaatatcataggttctaagtaaatgctcattaagattccttttaaccaaagttgctatggagtcattgaaactctactctgggctcttaataggaggcaatgcctttactgtggtctcaggtcctaaggaatggagtccaaatgtatgtggatcacataggaccccagtagatctgttgaacaaaaatgctaaaatcttgtccactgggaagcagtttgcagaggaaaacttacagcagccgtggttctgacataggtggtgtagctgttgcctctgataggtagaaaacaatgcagcagaattggattccttggatttctgctgatgttcatgacttgtgggtgttattcattgcagtcaatcaatctgtagctcttacttacctgtaccctcagtaaggcgatgggtgacttcattgccagtgaagaattgctagctcagtctccttggaggacattgcatcataggtcaaggtatttcgaatgttccaaagtcattttttccccacaataaggtagttttcgctaaacaggttttcttctattgtaattgatggagccgggtccttgacaagtaatccttttagattctctgccacaaaagaaaatctcttttaagaaatatcgggcattgctatctgcttcctctacagatttcaaatgaaaaggaacacctccttttctgctggcacattctcaaattcaagatggcatggtctcagaatagctcactctagctgggggtgccggcaccctgagatgcatctcactgtgtgccctggcaggccaggagggcagtagattcccctctcccacccactgagaggcttggctttgtttatcctgaatgttgatatctctaaagcatctatcccagctagtgcctcaagctgtcgttgtgccactgagatttgtgcctactcagacttgatgtcagttatttaaaatcactagataacaccttcctattcccatatacagccttgtgcatgtcatcatatactttgtgtgcactcactggtaaccatttttattctcgtcaatgcaatcacttgtttcctttaaattgggcaaatgaatggggggtttctcagagacagctgcttggcatttcaaattacttgactgttggttccatgattgcttttcaggaagtcaataaattttgctgggagataccagagtaccccgctcccccaaatatgatttgtggcttagtacaccacagtaaaccgtgaatgatttgcctaaagttcagaaaaataatcattttagatcatttttaatagatttctgtgaagtctggtgcctactgagaaattacagggtgggagtcactggcaaaccctgtcttcacttcctcctttcctctctctctgtctttccttcttccctctctctcctccttcagagagggcttcctcaaccccagcactccttgagggccaggacactcagttcaccctagaagttggtatcttaatctgattatgtaaaaaaaaaaaaaaaaagatttatcttttaaaagtgtttttttgcacatttgcttttttttttttttttttttgggctaattgaccaaaatgaacatatactgcttttgtaataagaagtgggaagctctgtaaatttcaggtcaggagagggtgataagtaacctaaaggaatgaacttcccattgcaaaaacttcctgcatctttcttggttagtagggggatgatttcctaataagatgagcagctttactctgtttacttgtatctgggccctggttacagaatgcagtgggttacactgagatctctaggagagcctagtgccttcttgtggaaggatgtggtctctgattctgggtactgtgaagaatgaattggcagccagtacctgttaccatacctaagtaaacagcagggtcacttagatagtggaggtctaagggagctcaaatctaaggaagaacaggggccaaatgaacaggaggaacatgctgccttgctgtgagcccacagcagcctgttaaattctgcacagaggttagctccttcccctacctcttgggggtctggggatttgagggagtagaacctttggctttagcagaggctggtggttgaggctgcagaaaaagtattagataccctcttggcacttccaggctgagagaccatggagcatttagtattatgggccaccagactttgtttcagctattttgtagatgacgtttcatcttaatgcttgcatcaacccagtgcggtagatatatcttcatttttaaaaagattggaaggcgcaaaggacataggaaaattggcccaagccacacaagcagtaaaggacaggtgagtttgacccctcatgtgtctgcccagtgacttgttttactgtagaaattgaaattgtgcagttgcatatggggacattgcttgaattgcaggtattctccaccctgccccgattctgaaacccagtgaaacagccatggctgtcaactggtcagtgcccttggtttgaagagggagcactgaccttacattaagtcatgtggctgtggtttataattatctatggggaataaacacttgaatctggttgctgcgcatttatcatctaacaccttggctgagatgcgggcgggagggccttctcccccacagcagagcttgagagacttggaaatttgatctatgcaaccaggcagcatccataatctttttatgagtaatatgatattcggttgtctcccttcagcttcagaaacgctctggaagtgattctcagggcctgtatacttggccatctaccatcacattgtctattcacattcagtctgggggtacaacttttgtcctgtgtgtttccttgaatttcttctctccagctttgtatagaaattatgctatgccgactgcctggccccttacatgcttcgatacacatccattgtggcttgctggggtatttttggtatctgcgttgtgtacttggcacttgcgtgtggcctaattcgtgccttcctttgctgtgctgtagctgcaggtgctgaaatttggaggttttatttttaagtcagaatgttgatagtccatgtaactttaaagccctaccatgaaaagatgacttcccaaaataaagacatgtctgaattttgtagtagcttttccactgcttaagacttaaaaacaattaagtcttgcatcagtcatttttggtttttagtttaactggtttttgttgttaaagattttcttacttgatgccattgttgtaatttattatttgctattcataaattggctgtgtctcaatatctaaataaagtaaggacctcatgggctctctccgtaagttcgagaccgtttacattggtaagtcactgatttcaaacaggcctggccttgcatccacgttctttttcttacaaccttgaagatcttttatataagtgatttaagcaaaccagggatttaagcaaaccaaggcttagcaagattatctgtaaaaggggaataataacatctgcccctctgggccggggtgaggtttccagataccacatgtaataaaacccaatcactgctcccctgagagctcgaggcagccacctgctgggattttcctttcctctgagaatgtaatttaatattcttagtttaacttgaccccaacttcctggttcatcagttacataatctcctcactgactagctcagagagagaacctttctagccttggagaagctctagatgttgacctgaagttgtgttgtttttagcagttactgtatttattcccggaggactcagctggggcttctctcctagcctcttgctttggggatctgctttgtcagagcctctgagaatagacccttggctatcacatgatcaaagcatggggaacctactgagacccaaccacatttataacttattctgagccgtatacccaggtagctcacccattacaacaagtaacccataaatctctttgtaagtgattggtggatttttctgagcggagtatctgtgtccctttagagctgtgcttggccctgttgaagatgttcagccttcacattgggtggcagctggtcgaaacattcctgtcagtgactgcaggacagtaaccttcagacctcgaatgccccctaattttctgaaatgaagttacagttccttttctgttcaactagcaagctaaagttcagccctcttacctgattccacactgatcatctggaaggaaggtaggattcaaggagaactctttgagtggaagagcagtcagagatgtaattctgcgcctgttctcttacagcaaaaccaagaacttttgctctaagagagtggactttgggagtgaactttgtcagatgattagatggtgatgtcctttcttgttaaaggaggaaatccatgtaggagcctcaggatcgcacaggctgaggactgagtgttaaacatggcaggccttccttcatggggcttgagggatttcctgcagtgcccttcctcctctccctgaccgcctacctcctgcaaaagatatttgttctcagctgggcgcggtggcatacgcctgtaatcccagcactttgggagactgaggcaggcagatcacttgaggtcaggagttcgagagcagcctggccaacatggtgaaaccctgtctctactgaaaatacaaaaattagcctggcatggtggtatgcacctgtaatcccagctactcgggaggcgaagcacgagaattgcttgaacctggaaggcggaggttgcaatgagccaagattgcgccactgcactccagcctgagtgacagagcaagactccgtctcagggaagcaacaaaataaagatatttgttctcaaaggtgaacaagttactgcttttacgtgctggcttcatgtattggctggctccctgctgcttgagagatgatcttatacagttgaagaaggcctctgctgcaggaaagcgctgggtatgtgtgggtcagccccaggcacgaacaagggagccccgcaccacaaaaccagtgaagatggaggggattctccatccgaattgtcttcatctcccccaaaccccacgtcccttccaggcttcttatctggtctgtttaatccaggggtgagcaaaccgtggcccactgccacctgtctttataaagttttattggaacacagctacacttagttgtttacgttttgtctgtggctgctttttcactgacagtgatagcagaattgagtagttgcagaaggcctgccaagcttgaagtatttactctctggccctttacagaataagtttactgatcttgagctaatcagtaatcaaaacaggtctgtttggaagggcccacctttcttaaaacccagctttaggaagtgcagttaaccactgtggtggtagatggagagtgccaggtgattttcagtgtaagcttcacacatctcttcttgtcattaaaccaaccagacattttccctatgggttttggatgccctcaaatgtttatttataatttcagaaggcttttagtgtttcagtgactgaaaaacctatgtggggttgttctttttataatgtatcatttaaaataaatttttattttggaatagtttaaggtatgcagaaaagttacaaagatactacagagcttccgtagacccttcacttcccctcttcacttcccgcccccaccccacctccggctcttagcatcttacagaactgtggtacctttgttaaaaataatgaaattagtgttgatacagtactgttaactaaaccacagacttcatatggacttcaccagtctttccaataatgttctttctctgtttcaagctcaaatccaggatgccatgtttctataagcaactttagattttttaaatgatgacatctacttaatatagtcatacttttttccctttgcatagctgatttgctgtcttttggtaaattaaatggttagtgatgatataaccctagaaatcagaggtaagatctgacctagaaatatgtaatagtagtgagggcttcatttattgactgcttgctatgcttcagggctttacgcctatcatctcatttaaacccacagtgacccagccgatgagtcatgactctcttcacgttagctgagggagtttaggttgctcagccaagtttcagttgtggatgacactaagtgcaggctaatgatggcaactgtgggccaacctctggggggcactcgtaagtcattcgcttccttctcagcatagcctctagctattgacaaaaagaggaacaagcctaggggaggaagaaactgcaagctggcactcagccaacaatgatagtgccagctctggcacccaggtctctctgcagagtggcagagtcttaggcatttgtaatttgcatgcgtacaatccttcaatggcccctctttgcctttaggttatgattgtgcctcctgaatatcccggtacttgcatctctcaccattctttccatattccattctagtcactgaaaaggacttgagggtctgagatctgtgctgtcttgtcaaaacagggtttactagaaacatgaccttgagtaagttgctttcacctttctgagatggtcttctcatatgtcatgtggaataatagggtggttgggaataagtgtactagtgcctgcctgttgcatctagcacagggctagattgcacagttgtgcctcacatgagcctgggtgtggggaggtgatgacgatgttgactatggtagcatcagcttcagcattagctccgcacagatgctgcctcctccaggaagccctcctggctatccccatggttattaggtgcttcctccactcttcctctgagggaccttgggcagatcgctacatggctctcagtgcctgtattatggttattaattgggcattctccactcacttggctgcagagcaggtggtgtcacggtttcctgggtgtccccagggactagcacaaggcctgacaggaagtcctcagactgtaaatgatgagccagtgggtctactccgaaccttcctgatgggcagcaaagtccttctcccccaacgccgtgggttatggcgacttgcatgtcacaggcctttgtttctctgcactgctgttgtccctcggtgtgctcgtgtggagccaaacaatgtgcttgcgtgtggagttctccctctcctggcacttaaggaataactggcatttatttgaacagagattttcccataatatacagatctacaatatttccttctgtctttattaacattttcaaacactcttgcccaggacagctgttctagacttatgctgtatgtttcccagactggcatgaaagatcatttcactaatgtgttagcttctgctcagagacctggcaaatgagagtttagaatctttcattgcagtgcaaacttctgatttgatctcgtattgtataaccgtagtgaaatatcttggtatttgggggatttagtcacttcaaataagcattcatttcttttcttaatgcgtattctcctcgctctacccttttgaatttagattgcattcagtgcttatacaggctggaatcaggggcttgtatctctagtgctgcccaaagcctgacctgtgtatattatgcaagaaatgtttgttagatgcaggagttctctggtgatcggtgcaactggtgtcgagttttaacagttaaggcccctactcccttccccctttctgaaatgtttgtgatctgtcgctgccagaatgtttttaatatgcgtggagcgtagagtctggtactggaggcgactggatcacagtttgaatcagaagcagcatggactgctgatctgttccattttctaaaaatacactttgtaaagtaaccacatatacagcactgtcataatttcatgttttggggtttggccccactgctgcacgtgaaagctacaaggtctttccccgaaattcaggcccatgtttccaagcaagagtgttgactctttttaaagaagagagtttcctcatcctttacacaaatgcatattctttccctgcttactgtcttcccagctcttccacccaccccacctaaacacaggaaatgcctccgtggcgtcaggaacagtcaggtagactttcagtctgtgcattttcaggaacgtgtttccaagttagcaatttgaaatcttcatgtgcttttagtgaaacactcttgtttctatttgtcccctttctttgagaaagaaggacggtgatgttggccttccgtgctgaagatagagaagaatcctgttttaggagatgccttttgcagtgtagtgtgttaagttgggaagatagcgaacagatattagcagttctgtatatttcttctgtcttggtaaacgtggtttctgagctttttaggaacagttgacttcttcctccattttcgcaaactgcaacttggctttcaggaaacttgtggcacttaggtacttttttgtacttggtcagtagcttggcattaaacagaattggtggtttgtgctcatgccagtcttactaatcaaaaatccgtagttaaagggacaacaagaaaaaaaggcaataaatagattttttaaatgtttaaatttgggaaatggtaggaaaggactctcaaaaatttcattatgttctagcacataatgagcttttaattattatttcactaatcacctttgatctttttcccaaagatgttctttgggaaaaagctggggctctcccctgaaccacagagtacaaaaaaaatgatctggtgagtgttttagttctcccaaggatgatactgtcaagaactgtgaagggtctgaaaccgtaccctgcttgcgagctaccaaattagcctaccatcgtttccgggatgctggcagaaggcgtgggactcgcggtcagagccaacagcctctattaatcacagcaatgacagtatcagtgttttcttgtgccagttccctgagttccagttcctacaaggcaatgcagcttgggccaggtcacacctacatgcctcaagagagaaacctggagcttagaaaacccagatcttttatgatgggtaaagcccactctttgagagagagagagagagagaggggagagagaggagagagagaggggagagagacgagagagagacgagagacagatatgccttagggctcagttctctcttggaacccaggttgaggaaaagctgttagtcctttgcttatgggctgccattccaaaatgcctcgtgttccttcaaaatgttttaaataaaagaagggaaagagaatatcagaaattctcttctaaaactaatactttcctctaccgttttttgagaaaatgtaggtattacattttagatgatatttaaaaaatgtttcgattcttcttattaaaaagtaacccaaagtttggaaggtaagagatggttacataacgaagctcatgtttagtttttttttttttttttttttggccttccaaaaaatatggacaggttgcttttgggagacactgtgaaacatggcatcatctgacgtgtactggctttagatgtgaacccattacacgacttaagtatatttactcacttgcctcacctgatccttcccagccgacaagcctctgaaaaatttcctctatccaagcagctactgtgctggttcccaaaccttgtttggctgcacaggtctcttctttcacaggcttccagttgtccacacatctcattgcctcatctccatagacacagtctccagccttgcacgttgccccgtcttgtgaatattccagcttacagtgtgtctgcccttgtggggttctgaaatcaaaggagttacctagtagaggcttctgagacacacccaggaaatcacatgcagaaacttaagtctacatgggaagtgtgggaggtaatcttggtgaaccggttagtgctagatcacatagcgcatgtgttaaatagcaacagaaagatcacaaaaaaacaaaaaaggtgaatgtggagaacttgaccctggacaaggactgctgattctgtgttcctgttttgggatgagatggagaaagccagggtgcgggacaggcaggcttttctgttgcgtatctgtcattacagtggttctttcactttctaaaaactgaggggtattttccctaaacaaacacacccacccacccgcgggtgttttcatggaggtttccttttttttttttaaagaaagatgtgaggattaagcagacaatacctataaaatttatgctctttatttttcaagggccacataagtgtagtcacatagttactttatcttcttcctgtaactgtcctccctctaggcagagggatggcagtcattgacgatttatgactctgaagagctgatggggggtgtggcaaaacatctcatcttcctccattcacaccctccaagcaccttgaataattgctgggagataacttggcaattgtttggctaactgtggccttaatttcctgccagggcttcactcacacctacctgtcctttccgttcctgattagtaagacaacattcagcgttccttttctgctaaaaaaaaatggagtgacttttgtgactgttgatacagatcactttaagatttataacaaatcttgccttgggataaaatagattttatgactcccagatgaatggctggataagggaattgtaaataagctcttagaagaataatgtttttttttttaaatgaccccctttttttcctgaccaaagcataggaaagcttctgtgtattaaatacctaccaagtcaattatgcaccagatttgtaaaatccacttttggttttagagctttctaatttggttgctccgatgttggctaatggctccatgtccccgccaatctgcctggcttcgtgagatctggaaaaagagttaaagatcttcctgtggaggcaagagaaatacttgaaggcatcagagaacaaccagtatcaatgtgccctttcatttattggtgtcgcaggccttcagggaaggtgtatgggttagagaggccacagggggagtattgggggaggtggaactggagctgagccaaggaagggcaagattagagcagggcggggagcttgagaggaaaggcaaagcttgaggcagaggtgggaatgccaggaagcagagctgtggcagacagggtaggctgctggggcgggacggcccctggtaggtgagcaggtgcaggagcattgtgtatagggagacaagtgggtaaacttggccctaggttgctgagtgtcaccgtgttggaggattgcacctaggggctggccaggagaccatgctggtactgaagaacacggtgctagttctccggcaggggaaacaatctgagagcatgctgaggagtgcagaagcctcgggaaactgctcgtggaaactggtgtactggtttagcagaagacggggtatcttaggtgaagagcacctgggtgctgcagacagggaacacgtgtgtgttcaaaatgtcactgaatgaaacgagacacttctcaagggaatgtcataaaccatagtcgcctccagttctgaggtcactgaagagtaattcagattaacacgcatcaattatttgaactctccctctgtgcttagaggccattccaggtgtctgttcactgacctgtttacattaactttaaaaaaaaagggaaatattaagaaatgctctggtcaccagaagtttttgctgttcattggtttcgaagtctttggccctctctagaggaagcctgaatccagtggcattttcttctgaattgccacacgtgtaggagcaggtgaaagatctttaaatgtttagctgatcttttgcagctgccggtcatgtgcttgatgctagattcctgtggttttccttataattagaaaaagtgaataccttgaatgtcccactactcctttgatcaattagattctggttttctaattagtgaactcatagggtgctagcaggttggacagattggagaacctggagaaggacactaagacagcttgagtttggggctgtggctggtttctgggttgttggtatccgtagtttgggctgcagccccggcaggatgcagagaggactctgtccctactggtcaggcatgataggggaattagtgacctagtcatctgggattgggatgttgtgcatttcgtgttctgtggcctttctgctattaatcctgtccttcaaactcctacccttagcccaggccagacccgatcgtctatggtccagtggcttaacccacagtctccaaccacaacaagctccaactcagctgtgacacctctttcacccgggtcgtcccctttccccttttctcctcctgctactgtagcggacaagccacctgaaaggtacgtggtttggagtggaatgtggaatatggtggcagcacacacagggggcttgatgaacctgagcaggttcttgtgttctctgctggcaaaagcttgcccagatacccccagcatcctggacttcatggacagcacttaccaccttgtatcagggccgtgcctcacccagttcagtagcaaggacgttctttggagaatttgccttacatgagacttgcttgagcctactctgtctttgtggtgctggttgtgcatttatgaagaagttcttattttggaagaacttcttgctcatgagtataaagcacattcttcgttttaaaagtaggcaagctggcactggaaacattcgcttccatggcatccagtggccaagtccatagaggacagagctgctgccctccagcagcctcttccacctgtagtggctcaggtgcttcttcctgtcagtggcttcccccacaccagtgaggtgaggcgtttcctttggatttgattagactggctaaaagcatggtttccgtcctttccatgaacggacacagaggttgctttaacaaatggtgagaagctgggcctggtgtgcctttcttggggcggaggcagggtgtaaatacagaagactcaggcaagagcaacaagccccttccagagtggtggccacccggagtggatctgggccagtggtttctcacctgtggagtgtggctgtgccgcctccttctgccggctggccgtgtgtctccaggtgcgtgtgcttttcctaatagaccaactgaagtgcttggagataaacatgtcctgtggttctaacagtgctgaatggtaggaaagggcatcccaccaggtagggaggagaattaggtgaagtggttcagtgacagctcctcagagaggctccctgaggaaaggcttgaattggaaacccatcatttacttgaaaatcaagtactgttcttagcctgatgttcacttccacgttaatttctcttttgggaggagttgccctactggtgacatcagtgagatttggggaaggggggttggggggtgaagtttctctctgttttccacattttcattggtgtcttttgtattctctttcttttcagcatccgcagtcggaaggctcgagccgtgtatccgtgtgaagcagaacacagctcggaattatcttttgaaataggagcaatttttgaggatggtaagtgttagtgggagcttcgtctgttaatcctgtccgcaggattaataagtctgcagcacggagtgagcagtcagcgatggtgctgttgtcgggagggcgagtctcccccttgatgctttggactggattaagcggctgcgttaggctcccagaccccaatgccaggggcctgttgttgatggctggaatgccactatgctcgcttcttgattactctctgacccatctcatcttgtgggtcttcgttcaggtcatctctctcctgacgggaagaagctagtgtcacttggacttaagaaatgtttctgatttgcacactttattttctttgttctcccagagttgctaaccaagtcctttaaatgcttcgggtttaccaactctgagtcaacagaggatactactgtccttaaaaatttttgatttctatttctcttaccatttttgtgctttacatttttgctgatttgaacagtgtgtgagtctccagattcgggtattgactttgcatattgaaacaagggtgtagcttttgaggatttaatattcatacacaagcatttaggagctatgcctggttaaatatttcaaaaagttctcttatggctcagtgtcttttttctcctgctcttgctttcttccctccccagtcctgctcattatgaaatgcattagttgctgtggaaaccgtgatgtcgtgtgtgggtggagctcctcagaagagttccagggaagcagtaggaaccttagctgcttggaatggaatggttgattatccagaatgtttgggatatgtggaatgtatcaacacgaggcacagtggtgtactgtcagtaatgcagcatttgctgacgattgttttttagaaagcaagttgcctcatttagaatagatttctatatgcgtgtgatatgtactcttcagagacagagactcctggtagtgtcagaaaacaaacaacaacaacaaaaccccacatggaacagaattagactttgtggagaaattttgttcttggaatagaagcaagatcattcctccatcaccataacatacatgcagttttgccaagagaatgtggaacgtagctgccctgccccaggcctgtctcatgttggcacaccatatggctgaaggggagggtgcgatggtagtattgaaacgcactcatttgagaaatgtgatgaatttttattttgtgtgattggatttgtttagaagactctgaactccctcctgcagtatggtttgtgagatagttaccttggtagaaggtgtatctactaggataccttaggctgcaggtaacaaaaattgacacaactgtttgaatcaatcatgaagatggattaaagtcaggtgcagtggtgcacacctgttgtgccagctactgcagaggctgaggcaggaggatcacttgtgcccaggagttcgaggccagcctggataacacagtgagaccccatctcaaaaaaaaaaaaaaaaagggttgaggggattagtttacacaatagtaagtgtggaagtagggagctctaattttaattcatagtctcaaagatgttatcaaagaccaaagtatttccatctctctgtggaactgctctctgctggtggacctgggcctctgtcttgtttccctggcgggagcgagatgactaccacagttccatgtatcatggccacactctggcggaaggaggtgtctcatccttgtgttcctttaagaatgagaaaacttttccaggaatttcttcctagtttacccatcctcacatcccagtatgcagaactgagtcacatgcttaccctacatccatcatttgcaaggatttagaccaatgagaatcacacggggtataggatacctgctctgggcacacagccatgtgaatgagggtcagtgcctaaagccaatgcagatctgccagtttggataaaagaggacagcctggtaggcgtctgacccaggagacttacgttctccaggtctaaagtcccgagatgatttggagtcttcctaaaaagaaagtgtgcgtgtacacacgtacacatacatagtcacacatttgtacatatgtacacacatgtgcacacaaataccagtgtctccgtgtgttttggaggaggagagccactgactgcaggcaacgtggattctgaactctgcaggtattttgcctgggctcacaccatggctttcttatcttctgtgtgacctgggacaggctcctttaggactctgtgcagctgattcttcatcctaagcggcagggatggccacaacattgatgttgtattaagatagcattggggctactagaaaaagaggtttctgagttgctatagacgtatgggggagaggctgctgaccacgatgccacactgggtacattgtagtgtgccatagacgaggctacgctttgagccagtttgtgtctcccttggttctgtgctctgcggtgctggtatccagctctgtcaggactttgctggccggggcaccccgggtgtctcaggagctcctcgttctgtccctcccctaaggctggctacttggaaaataccttgtggatgtgttgacactctctccctacccagggatgtgagcgtctcatttaatgtgagctacttgtcttgtaggtgccgccctgattcttttgcagcagggcagataatagtggaaggtgttcagaatcaacagcattaggcttgctgcttaataggaacacttcttgaaagggtacagtaagtttaaagcccttaagcagggtttatctgtgtgtgtgtttgcaccttacatcttctgtgcatagttgatctcttagctagttaaaagcaggtgcttgcccagaacacatctagtgaagcccttccttaaatggctatggggtcttcctgtctgacaactgacactgagaagacagactggcaggtcatctgaccacggcttctgtggagccaggcagtgttccaagtggccactctagacagctcagcccacaggagtactgccgggaatgctccctttctgcagaccagcaatacttagtgtccctggaatgcccaagacatttttcctgtgttcacttatccatttggagtcttccagcctccatagatgctcttgcagtgcaattcctttttgtacctcatacaggcaacaaaggaaattggtttatgccacccagtggcctttggagaaaacaaactggaggtcagagtgacccctgggcggcctcgtcagtagttatgcgtttgggatgtgtgcagctgtgagatatcctgacccagagtgtggttggcacaggggtctttagcaattgtgtagctccatgactgtccttgttctttgctcttactgggtgggcctggacttaagttatgagttccagttctaggcggaagatgtgtttctctagtagactcactaatgcctagctgtttctctggggctatgcctcccaactcccccgccccccaccctcgggagagggctgtgtttgtaaggtctcagggcagtgacgttcctgtgatggccagagggacctttcccttttctctgggcctggggaatcctggaaataggttttgctggtgaccaccagccagtcctgctgtgtctttccagtcaggtgcgctccagttagatgggcagtggttgcctcctcaggggcagggttgggaggggtgctgaggcaggtggtttccaggagcgaccccacgtggcagcggcagcagcagcgggactgctttcctggctgtcccaggctctttgtcaacatccacatgtagatgtgggggagcaggtgtggcccaaattaatccttaaaagcctctggtgattaaactttaaaggtctcagatagacacagaataatccctggaaaacaatttggcattatcttggaaagctgatcacatatagaccccacagcccagcgatgtggttgccagatagattcctagcacaggggaatctgagaaaaaaatatcgagtgaaaaaataagttccagatgactatgcgcttctgacttatgtgcttctggttaagctcacacatatgcaaaataaataggatattattagggatatgtgcttgtgtgacaaaactgaattttacccatagccatggtaagataatgagaaacacaacattcaagctactggttgcctcggggtgggagataggacagagcccaggacgcagcctccctgtgggtcctgtggcagttctgaagttgagtgtgggttcctggcactcaccgtgtgatgatgacaattcagtgatttcagtacttgtcacatacactgtctacattatgctgaaaactgagttggtggaagggacctgcctctctttggtgctacttggggtccctgcctcacacccgtcttgttccctgttgtggtctaaaggctgtgaggacaccgtggctgaagcagggtgaggttcctggactgagacctgcaggcatagggagggtgcgtgggaaatgacagacactgagactgccatgttctccacccataagaatggaaaagcagagccctgttgtccgcgtagacactgcttgggggaggagtggtgtgataaactaggagaggagccccagatgggtattttggggttcgatgctactgagagaggtcagatcttcagagagggagggagagcctgccagccttatctgcaactgcggagccacttttcctgtgcttggggatgccttgctgttggtctccagacccttgtagcccacctcgcccactgctcagctgggtccacttccaaggctcttggatgttacaggatcccccttggtcgcctctgtaaagcagtgacatctctctccctactggcttctgccttccagggaggggagggctggggaggtggtgaatggggttgtggaggcgtctctctggtttgttggttggggagatgcaggattcccggcctggccttggtttccccaatcaagcctcctttcacctccagcgttgtagaaaatcacctttttcctcctctgttcatcctgtcttttattaataccgagtctgtgcttgcgcaagtgtgtggtgtgtatagggtaggaggagaaatagtgagcatgtgcaggtgagactatatttgagactctcttactgcctcctcatagcaggtcctgcaagctaagtgctagtaaccccgtattgcaggtaacagccgagcaaggcccaggggttaatttcccagatgcatctaggtagccaggagtctcctctagggctctgacttcagccctgggccccttgccactcaggcccccacattgttacaaccctgagggcctgttttgcatagaatccaaagcttttccctgatggtggctgcacactagtagcactgccagctggggtgtttggatgaagtgagaagtctctaaaaatcctggtatgaagaacaatgtcagagtcaaggtcagtgaaggcatgaaggaagtaacttgctgccagatcgctttgagagcacatctctgaatttgcttactcagtcattacacagataatcatgtgtctgacacggtgctaggtgctgggtctcatgttatatgtgttacatgctctcatagtctggactagaagagaatgtctcagtgtgtctctcctatatatacacgtatgcctgcacacacgcacacagaacatgtagggtgcataactgggagccccgacctggtctggagccaggagaggagtcctggaagtggggggatgctgaagctgctctttgaagcatgagtaggtgctgtccaggcataaaggcagggaatagcattcaggcccaagggaacagctccagggaggcgttgaagccagaagcttactgaatgtaaggaaagtgcaggcggttagtctgcagacagccggaatgtgttcctattcatccaggggagggaagaacaaacagttaccttgttgcaaaggacaattagaattggattgtccctgtcttccaaactgtgggcagctataccttagaggaccatgaactcaattcgctgagttgcaattagcattcaaagaataatacttttctacacaaatctatggggaaaaaaagagtagaatacagaaaggaaggcattgcatgcgcgcagtgagggtaagagtattgcttcatgaaacttgtgtgtgttacggatgtgtatgcctgtacttggtttttgatatgaaattattctcctgggttgtgatcagaagccacctttcgagttggtccgctggagtagctcatgcctcccctttcctttatgccacggctgccacgcctgcacctgaccatggttgggggtttgagctggggcctgctcacagctgggggttatgaaatgcttctgtattgcatttccgaacactggtgaggagtgcttggacctgtgccctttgctgtccaggctgcaattttctcgttgagtatcacgtgaatatttatgaacagtccattgtgccaggcaccatgcccagatgtataaggctcaggctgccttcaggagtttcccatacagtgtgggagtcagacgagactctgagaggaggaggcatccaatcaggtctctaaacaggaggaactacctggtgaagaggtgggggaaaggcattccagtcagaagccactgcacttgcaaaggcctggagttgcagttgggatttctctggatgattcactgcagttgacatgcatgatgtgccagtggagtgtgaagagctcctggaggggcggctggagccaggtgcccaggggcctgtgttacagaccagtaaggagcttgagtttgaggctgggagtggtggctcacgcctgtaatcccagcactctggggggccaaggcgagtggatcacctgaggtcaggagtttaagagcaggctggccaatgtggtgaaaccccatctctactaaaaatacaaaaattagccaggcatggtggtgcgtgcctgtaatcccagctactcaggaggctgaggcaggagaattgcttgaatccgggaggcagagattgcagtgagccgagatcgcgccaccgcactccagcctgggcgacagagcgagactccctctcaggaagaaaacaaacaaacaaacaaaaaaaaaacacaaaaagcttgagtttgactttaagcaggggagtgatgtgatcagctctgtgttctagagagttcactgtgcatgttcgtgcacagtggattggaaggggccggactctggaaactaggacactagttaggaggctgctttgggattgtgtagatgaggattgtggtggccagtgcagggaggcagagcctgtcaatgaccctggtgcagactttgtgacccaacatcccagaagtggcccctgttctctactggccactccctgcttgagcttttaagtgaacacccaggaggcaagtacttgggggcattttgtaaaagtgatttttctcttccttttcagtacaaacctccagggaacctggctggctagaagggactctgaacggcaagagggggctgattccacagaactacgtcaagctgctgtagctcctggcctcagagcccctgctgaccctggcacccagggacctgcctgggggcagagagctgtcttcctcctccgaggctctgggctgcacccacaggtacctccacacttgggagttaccatcatcacagtcagccctgggggtggggggtggtgggcagggatgggacgcaccacacagaactgtgattgtggatcaggaggggaatgtcaggattcgcaaaatggacttttcatttgtcaagtattgggacttgtgatttttaattatccagcatatagaatgagagggagggcagccttctgccacctgtgtcgcctccactggcagtcacgccaccagagccaccctggctccctctcctccctgagcacctgctgctgcgattttaaagggaactgtactactcgcagtgataggtttgcagagtgtgtgcttggctgtggcagcctagcttggagaagctgctgttggtgcaagggagatggtctcaagtcagagggaagcagagacgcgcgtctcaagcctgcccttcctagacggccacctgcaggaccccacactcactgcactggcagcgtgcactggcgtatttgtaacaggcttctcggtgctcctcacccgtgtgctgttttccaaacaccacctttttgcctcaaggtctctgtaaatgaaataaactgtaatttactatttgatttgtctgtcctaatgtggggaagcggtcgtggaagtcattgccccgtcttgatttatgaattggcagcctacgatggggactcgtctctctctgctgttggcctgctcacaggtagaatctgttagcggggagcctggagtattcggggtggggcgtgttcctgggggcagcagcagcctctgatgtgtgcaatcctggaagggcattcacacctcctccagtggctgcacaggcctctctaccctggtgcctgcaggacctggagcagggctggggctttggccctgggtggtttgtgtgagccatctcagtgccctgggaccagccgtcctaccagcaccattgtacacccctctcctacaccacccagcatgcctctgccttccaggcctccctgctaatctctccatctggattaatttcgacgtggagggaggagagggaggcagagcagaccttcctggaggagccttcacccttgaccctgccctgccccgtgatgatggccacccccagcctgggcaggccttgctctgatgtttcctcattctcctccacctacaagccacaggtgcaacaacctcttggggaagaggggacttgccttggaatgtggggcttagttttagtggcctcaggattctgaagccagccccatgccccagaggctgctctggggcaggcatgactttccatgcatccccatgggaggttcctggacctgtcagacttctctcaaacatttatcaaaggacggatgtgtctgttgcctcatccccagatgaactgactcaagagcttgccagttaacagcttggaagtcacctcatgtggatcacgtgagggtgtggagtttgggagttgtatgtgtatggggaaatgtgattcttgaaaagtgtccgtattgtaaataaaaataaggacaatttcgatgcaacataatttaaaataatcacgggccccgtgaagagcattgagaccacagaggagcccagggccatcctaccacaagcgggtctgaggtgtgggccggggctggcttggccctagggctggggcagcataacctccagtagcctgttttctgagttgtcattgctgccctgacttgttgcttgggatgtagaaaggaaacttgactcgtgagaagaggtttctggcatgttccacttctgtgagagcccctctgcaggaaaaggcaaacctgtgggcagctagagcaggctcaggttagtgttgggagtggcttcctggcagattcctaattggtgtatcccaggggccattaaaaatctccctgcatcaggccttgattgatttgtttgcttgctggagattcctattgttaacagtgagatgcacccaaccagccgttcccctcaaagtgcttttaccaccacttaaagaaatcaccaccaagtctggctatctatgtgaccttgggcaagatcggttacccccatgattctgttaaagcctcctaaaaataaaatgatactgagaggtttggggttgaaatgacctaatagaagcagcgcacccagtatgtggggagggcttggctaacaggaactgctgttcccgtttttcttagttctacgaataagaatagcagtatcttgcatctttgtcatcagggtcttctgtgttccttaggatgatggggtgacaagtagtgaagttctacagctgtgccctgtggaggctcctgtagccttaagagctgaagacccctcctgtggctctgtggaagagtggggtagtgccagaggggagcaggggtgtttctgtctgagaatgtgacacgtgcacagcagtgtggccaggactgccaaggcctctgggcagggagcttacccctggacatggcccaggatgtactgaggaatgggatcaggaggtgttttcttactttggtggatcatcttccttcccctagaagaggagcggagtatgttttgctgttttagttggatgggtgcggctgctccccaaggctctgctgaggctgcctggacttccctcagccctaccttgctcagcgactgcagcaccaactgcgcctgcctagaccaggtccatagcctgtgttcattcagaggcagtatggtggtttggggcaaaaaagagcacttgggctatgtgtttcttgttgacactggggctgcagggcttgcatctgatggtgccacccacagggccttccctggtgttccctgcacctgtaaaggagatgccaggtgaaaacagagccaaaggacttgcaggggctgcagccccaacttccttcctttgtagtagcagccacacatgcagttgggggtatggaagggaaaagcaatgggtgtccatgccagagatggatgtctaactcattctttccttacaatgactgcacaagccaggagatattagcccattttatggatgagaaaatggagacgagcacttgcttgctcaggttcgataagctagtcacagaaagttctttctgctgtgccatcttgtcctcagggccatgctgttatgagttgaattgtttcccactccccaaattcacatgttgaagtccttaacccctagtccctcagaatgtgatgtcattaggaactagaatctttgcagatgttgctagttaagctgagcacagtagggttggccttaatccgatatgactgatgtccttaaaacaaggagaaatttggacactgagacagactcacatagaagaaagatgacatgaagagaaacagggagaagacagccatctacaagccaaggggagaggccaggaatagacccttctctctcagccctcactgaaggaaccaaccctgctgacacctccatcttggacttccagcctccagaactgggagaaaatgcatttctgtttaaggtgcccaatttgtggtcctttgttacagtagctctatgaacgtaatacagtggtgaaaagtgcgtgttgcattacaaacaagctgttttgaaatcctatttttgctattttatatcttggtgatctctggtaagttacttgacctttttatggttctgtttgtgccagtgaaatggaaagaggagaagcaacctgtgggatgtgacagttaaatgagagtgaatgtcctgtgctggatgggcacatggtaggaagtggggtttagtaaatggagaggactggagaaggcaaggcagcaggacactgtggtggttgggggtcggtttctgtcccccttctcatctgtaaatcactgcctgcttcctgccagcatctcttctccaaaagccattccatgctcttgtcctttgctgacattgctcagcctctcccctccttcccaacgccactccaggctcctgctttcttggacttgcctttgttcccattcacctccagactgggcatcttctcagcttcttaggagttctcccttccagtctctcaaagccagttctggttactcctttgctggccagatgttttccatgacttcttgaatcttcttgagccacgtagctttcctctgtccactctgaggatgctgttccaggagtgtgtcctcaaacagctctcccactcctagttctgcaaatgtcttctcagttgcttgtcagcactcttcctccttgactggcctgagcagtaatttattgctacctcatttgggcagcccagctcattctgacacttaaatgtctagctaaaagtatctcaatctatcggttagaagaataccttggaaaacactttctatctgaagatcaacttgattggaagaactcctatttttggcccaagagacctgcactttaaatttgggcagtgaatgcatggcagctcagggccatgccttggtgtctggattccttcttccttgtggagtttagcaactaaggaaacactgcaaggtggagcagctcccatgccaggagcagcaggatcagacctagccaggccagttttcacaggtgctgccatccaccctcagtcaggctggctcagggcatggagatccatataaaggggttttttcagactagggaaaacttggaaaccactgtcttggcaacatacatgctgcagcaaaatatctcagtaactactagtgtggtagacatttaaagatcctgatctttcacccctccccaaacccatgcccttttgtggagtcctttcaggctgactcagggcttgacctcacaacttgctttggccaatgggcttggagcaaacttgattcagtcagaggcatggaaagtgttatatgcctttccaggctcttttttaaagccctggctttgccatgaaaataaacccagactagcttgctggaggatgagaggccacatggagcagtgccactgcagaccagacagctgcaggctaaccacggatatacaaacaatcccagctcagccgagcctggctcaggtcagcacaccctagcctgcttcccttagccgactcatagaaacatgagaaatactaaatggtgattgatgtaaaccgctaagttttgggatgttttgttatacagcagcagctaactgcctgccactttgccccatcgttcactttgctttggacagtcttggtcgatgatcaatgttgagattgtgccttacccaattccagtgttgttttggaagctactgtttcatttccaagaaaattgctacagtagcaactggctgacttgaaattaaagtgccagagatacttgtaatcaagtcattttaatctgtgtacatttgcagagtttataaaaaatgttagagctgatttgtacataaagggacaatgttttctatttgcttggagggaattcagcatacagaagcaaacaagcctctaaatacataggcatcaccgggcacaattttttctttttttaactgctctggcatatagtggctggctgtctcagtggcagagacacagttcttagctaatgattcctaactgtgggctgaattctttgggcctgagagcacttctagagattgtgagaaatagtcacacttgacccaagaatgagtctgttcaattcaaaaagggcaccccctttagccaagggtgcacattgtaggggcctcctgccagctttgggtgggttcccagcccaagatggcttttgtttcaaggtaggggctctctgtgaaaagccctgttccctaataggtcaaatttctgaaatttttaaatctaaaattgcacttacagtatttcacacaccaaaagtttgtgctcccaattttcttcctgtgctgtgttcagtgggtatgctgtgttccagaaatggatctgttgtgtttcacaaagctgaattttactatcaatcaaatagtcttctcttgctgaaagcaaataatttgaacaatcaccagttgagcaacacactaaaaatgtactgtactttatcttgtgggaaatgttttctatttaaaaaccagctggtgattgcttactgctcctttgtggcccatattaatgagtggaatccaggggacaagcctgcagaaatgtcagaagcatcatggccaatggggagctgagcttcttgatggcgcaagggtgctgggggatgatagggtgagaccatgtagaagaacaactttggagtcagacgggggctccactcacattagtctcaaattctgcagaataagtaagttttcaagtggttgtgaagataaatgaggcaatgtatatatagggtttagcaactacatggcaatagttatccaatggttacagagtattttaatgaactaaatatcaatcaaaagtattaaaaacaaggtctctgatcagtcccccaaagagtagaattaacatgtggctaacataggactctttctaacatggaaaaccacgttctccatcttggatgtaggcagagtgcatacaatcaagatttgggagggcacaaaatccaggtgtacctacagacattcaaatgaatttgctccaaaacaacaggtgattaaagtaaaggatttattgtaatctgcttacagtcctttgcaaagacagacatatgtttttgcataaagatataaattgcttcattttaaactaatttagtgtttttttaaattatatgaacttttggtgaattatgaactgtaccaaaccaagatttttaagagcaatatggtacaaaaataagagcagacagacaatttggactgggacaggcattcaacagtgaatttagaatatggctttgctgtttaatcaagcaaagttacctggagacacacaaagagccagtaactttgttaatacaaaaagctgatgcagaccatctccatcccaaacctggttaagtaagtcagaattcccattttataaaaactaagtctgaactaaaagctgcttttgtaagtaagccatttgtttgctagcaactcccagtctgcatgctgtgtatttattaccttcaaagtgtggctttcatattactgtgcaccgtaagttgactgtatttaaagatctgcctataaattaaattcctgaaattgcaaattatgtaagaaaaactcctccctctgagtgcagctttcacaggtttccccttgcataaggcaggtgtcttttgaaagacaaggtaatgttgcctgcatggtgaaccctggagaaaagtgttgatctaattaattgctgcttcctcgtggccatgggcttctccagctacagcttttagattttggaaaataattaatatgatttcactgagtaaacctgatgattatcatcatttttaaaagattaatttggcctctattcaaagtagtttatttagtgcaatcatattgttagtttccccaaagatacatatgtttgtgatttggggcaagagaaaagccatacattgcatcagtgccaaacaaacagattaatgaattaaacattttagtgccactgtcttgcttatatgatctgtaatttttctccaaaactgtttatgtataaaacttatttttaaaacctaccttttaaaaatctaaaacccctctatctcccggtctccatgccattcagactgaaccttgccaagatgggccgtcccagcgcatcctgccatgatctgtgcgttcctgtgaccggttccaggagtgcagaacctctttccaagatcagaagggaatagctgatctttaacagagagagagtgcatggaatttttttttcccacaggagaaaatctgattttctaaaatgggaggaaaagatgctctctgagccatcaagttcccagtctcactctcgtagagctggttctgcttctagaggaaaagggaaacgaggcagctttcccaaagctgcagcactccaaggacctcctctcccacatgtgttgtcaaatgacaccttccaggagctgcagacaccgcagtgtgtcattccccgatggagcaggatgaagcagaagccagaaaacgtgctggagtcccacaaatgccccaagcgggagaccaagaacaaaacaaaaagtacagaaaaagtagaaaggtttcaagacaaccgaagaggtttcagtgtggttatttacaacagagactgtaaaataatggtaaattagatatgaagctaaaaaaggcacagctttccctttcttaaatacactgtaaacggttcattatgcatgcaggacattgcactttacaaaaaaaaattaccttgtttagacaaagatagtacttaaatagtctccagcaaaatagaattctttcaaaaatactttcccattcatcctattaaccattaaagattttttttgtatgtgtctcatttacaaaagatccttataccttatttcaggtccttcataatttatacatacagtaatgtacagcacagcaaaagactgcaaaaaattatttgtaaagccaacacaatagatactagaaatcaaaccaaggcatttaacatcatcttatccattctaattaaataagaaatggacgctaacgagtgtgtataccagtgatgcagaagaccgtggacgagcgagggctcagaggcagctgctgccccacgccacgagttctgttattacacaacaggaatctgtatatattttttattatttttttgtgtttttttaataacaaaagaatattaatgccccatattgactatacgttttatgtgcaaaccaagggtaagctttaaaacgttcgttagtccttgaacccttttaaaacaagcgaacgataccagaaactacacggcatagttaaaacttcttccatctgtgaaaatatcaaaatcagagttattgactagatatggcttttcatcccgaggaacaggaacatgtttctaagcgctgggggattggaggtggggaatccttcagactgctctggtctcgccaaatccacggaaaaacagctttcccggctccaaacctctgacatgactttaaacttgagaaactgttgaacaagtgtgaatcaaccatcacatgttaaaaacaggttttcttgggtccttctgggtgtggaacaacacagggaaacttaaggcaaagttcttctgggcagcgggcagtcacttccggtggaagtagagcggcttggcgttccccgactccaccttgggcagctggtcgctgatgatctccaccagcattgcggggaactctaccttcagcgcatgggactctcggaaggtgtagaagcagaattccagcaggtcgctcaccagctgtaacacagacacagggggcatgacacgggggcctcctttccgaccctggatccctctgccttctgactttggtgggaactcaaatgacaacatttagaaagcctcccaggagaccatgtcttcattaattgagcagagtcatctgtcctgggagaggaagaagggtgctcacatcacccatgtcatctgcctttcatggaaaacaaacaaattcagctgagagctgaattttgagcactgaatgtatgagctgaaacagggacagtgacagagttaacagtgactgggtcactgaactgcactcatcaaattctaatttctaaatgtgtgcctacacgtgtatctttgtattggtgaggggccttcccagggtgtaaggtgggctggtgggaaggggcaagtgctggcccagggtctaagcaccacagatgcccaggagggtgaggagcaggacagagcactgcacaggcagctgtggtgttcccctaactgggcccgccaatggagctgccgccaaggggccagctggcacttccacctgcagccccaggccctctttccttctttgtgggtgcctgccctgtaggggcagacctgagactcttcagctacttcctatttcaggctgattttgagacagtgaaatacatcaaggacaagttctggggtgtccccctagctcattttccctactctgtgaaccaagaacttttctcagcccctccagacctgacctactcctactttattaaaaaaaaattggaggctggcaatacggccaaataggaacagctctggtctgcagttcccagtgagatcaatgcacaaggtgggtgattgctgcatttccaactgaggtacccggcttatctcatttggactggttagacggtgggtgtagcccacagagggtgagctgaagcagggtggggcgtcgcctcacccgggaagtgcaaggggttggggaactccctcccctagccaagggaagccatgagggggactgtgctgtaacagtgcattctggcccagatactacacttttcccagggtcttcacaacccatagaccaggagattcccttgggtgcctatgccaccagggccctgggtttcaagcacaaaactgggcactggttagggcagacactgagctagctgcagtttttttttttttttttttttcataccccagtggcatctggaacaccagcgagacagaaccgttcacttccctagaaagggggccgaagccaaggagccaagctgttt

SEQ ID NO: 2114 - DNA, 3056 bp, Homo sapiens
atggggctgcagcccctggagttcagcgactgctacctcgacagcccgtggttccgggagaggatccgcgctcacgaagcggaactcgagaggaccaacaagttcatcaaagagctcattaaggacgggaagaacctcatcgctgcgacgaaaagtctgtcagtggcccagcggaagtttgctcattcactcagagactttaagtttgagtttatcggtgatgctgtgacagatgatgaacgatgcatagatgcttccttacgtgaattttcaaattttttgaagaatctggaggaacagagagaaattatggcattaagtgtaactgaaaccctgattaaacccttggaaaaattcagaaaagagcaacttggagctgtaaaggaagaaaaaaagaagtttgacaaagagacagaaaagaattatagtctaattgataaacatttgaatttatcagcaaaaaagaaagactcacatttacaagaggcagatatccaagtagagcagaaccggcaacacttctatgaactgtctctcgagtatgtgtgtaagctgcaggaaatccaagaaagaaagaagtttgagtttgtggaacctatgctgtcattttttcaggggatgtttaccttctatcatcagggccatgaacttgccaaagacttcaatcactacaaaatggaactacagatcaacattcagaatacacggaatcgatttgaaggaacaaggtcagaagtggaagagctcatgaacaaaatcagacagaatcccaaggaccacaaacgagcaagtcagtttacagccgaaggctacctgtatgtccaggaaaaaaggcctgctccgtttggttccagttgggtcaaacactattgcatgtatcgaaaagcagcaaagaagttcaacatgatcccatttgagcacagatctggagggaaacttggggacggagaggtgttctttttgaaagaatgtaccaagaggcatactgactccattgacagaaggttttgttttgacatagaagctgctgatcggcctggcgtttccttgaccatgcaggcattttccgaagaggaaaggaagcagtggttggaagctctgggtggaaaggaagctctgtcccatagttttaatacagccatcatcccaagaccagaaggaaatgcacagttggataagatggggttcacaattatcagaaaatgcatcagtgccgttgaaacacgaggtataaatgaccaaggattgtacagagttgtgggggtgagttcaaaggtccagagacttctgagtatgttgatggatgtaaaaacatgcaatgaggtggacctggagaattctgcagattgggaagtgaagacaataacaagtgccttgaaacagtatttgaggagtcttccagagcctctcatgacctatgagttacatggagatttcattgttccagccaaaagcggcagcccagaatctcgtgttaatgcgatccatttcttggtacacaaactgccagagaagaataaagagatgttggatattttggtgaaacacttaacaaatgtttcaaatcactccaagcagaacctgatgactgtggcaaacttaggagtggtgtttggaccaactctgatgaggccacaggaagaaactgtcgctgccctcatggacttgaagtttcagaatattgttgtggaaatcttaattgaaaaccatgaaaagatttttcggacgccgcccgatactacattccctgagcccacctgcctgtcagcatcacccccaaatgcgccaccaaggcagtcgaagagacaaggccagagaaccaagaggcccgtggccgtctacaatctttgtctggagctggaagatggtgacaatccttacccttccaaggaggacacccctaccagcagtctggactcactttcctccccgtctcccgtgactacagctgtccctgggcctcctggaccagacaaaaaccaccttctggcagatggagggagctttggagactgggcatccactatcccaggccagacccgatcgtctatggtccagtggcttaacccacagtctccaaccacaacaagctccaactcagctgtgacacctctttcacccgggtcgtcccctttccccttttctcctcctgctactgtagcggacaagccacctgaaagcatccgcagtcggaaggctcgagccgtgtatccgtgtgaagcagaacacagctcggaattatcttttgaaataggagcaatttttgaggatgtacaaacctccagggaacctggctggctagaagggactctgaacggcaagagggggctgattccacagaactacgtcaagctgctgtagctcctggcctcagagcccctgctgaccctggcacccagggacctgcctgggggcagagagctgtcttcctcctccgaggctctgggctgcacccacaggtacctccacacttgggagttaccatcatcacagtcagccctgggggtggggggtggtgggcagggatgggacgcaccacacagaactgtgattgtggatcaggaggggaatgtcaggattcgcaaaatggacttttcatttgtcaagtattgggacttgtgatttttaattatccagcatatagaatgagagggagggcagccttctgccacctgtgtcgcctccactggcagtcacgccaccagagccaccctggctccctctcctccctgagcacctgctgctgcgattttaaagggaactgtactactcgcagtgataggtttgcagagtgtgtgcttggctgtggcagcctagcttggagaagctgctgttggtgcaagggagatggtctcaagtcagagggaagcagagacgcgcgtctcaagcctgcccttcctagacggccacctgcaggaccccacactcactgcactggcagcgtgcactggcgtatttgtaacaggcttctcggtgctcctcacccgtgtgctgttttccaaacaccacctttttgcctcaaggtctctgtaaatgaaataaactgtaatttacta

SEQ ID NO: 2115 - protein, 782 aa, Homo sapiens
MGLQPLEFSDCYLDSPWFRERIRAHEAELERTNKFIKELIKDGKNLIAATKSLSVAQRKFAHSLRDFKFEFIGDAVTDDERCIDASLREFSNFLKNLEEQREIMALSVTETLIKPLEKFRKEQLGAVKEEKKKFDKETEKNYSLIDKHLNLSAKKKDSHLQEADIQVEQNRQHFYELSLEYVCKLQEIQERKKFEFVEPMLSFFQGMFTFYHQGHELAKDFNHYKMELQINIQNTRNRFEGTRSEVEELMNKIRQNPKDHKRASQFTAEGYLYVQEKRPAPFGSSWVKHYCMYRKAAKKFNMIPFEHRSGGKLGDGEVFFLKECTKRHTDSIDRRFCFDIEAADRPGVSLTMQAFSEEERKQWLEALGGKEALSHSFNTAIIPRPEGNAQLDKMGFTIIRKCISAVETRGINDQGRVVGVSSKVQRLLSMLMDVKTCNEVDLENSADWEVKTITSALKQYLRSLPEPLMTYELHGDFIVPAKSGSPESRVNAIHFLVHKLPEKNKEMLDILVKHLTNVSNHSKQNLMTVANLGVVFGPTLMRPQEETVAALMDLKFQNIVVEILIENHEKIFRTPPDTTFPEPTCLSDPNAPPRQSKRQGQRTKRPVAVYNLCLELEDGDNPYPSKEDTPTSSLDSLSSPSPVTTAVPGPPGPDKNHLLADGGSFGDWASTIPGQTRSSMVQWLNPQSPTTTSSNSAVTPLSPGSSPFPFSPPATVADKPPESIRSRKARAVYPCEAEHSSELSFEIGAIFEDVQTSREPGWLEGTLNGKRGLIPQNYVKLL

SEQ ID NO: 2116 - DNA, 1008 bp, Homo sapiens
atgagtgggctaggtggtcgccagcattctcgtcctatctcccatcctgatgtggcaggtctgtcagtggcccagcggaagtttgctcattcactcagagactttaagtttgagtttatcggtgatgctgtgacagatgatgaacgatgcatagatgcttccttacgtgaattttcaaattttttgaagaatctggaggaacagagagaaattatggcattaagtgtaactgaaaccctgattaaacccttggaaaaattcagaaaagagcaacttggagctgtaaaggaagaaaaaaagaagtttgacaaagagacagaaaagaattatagtctaattgataaacatttgaatttatcagcaaaaaagaaagactcacatttacaagaggcagatatccaagtagagcagaaccggcaacacttctatgaactgtctctcgagtatgtgtgtaagctgcaggaaatccaagaaagaaagaagtttgagtttgtggaacctatgctgtcattttttcaggggatgtttaccttctatcatcagggccatgaacttgccaaagacttcaatcactacaaaatggaactacagatcaacattcagaatacacggaatcgatttgaaggaacaaggtcagaagtggaagagctcatgaacaaaatcagacagaatcccaaggaccacaaacgagcaagtcagtttacagccgaaggctacctgtatgtccaggaaaaaaggcctgctccgtttggttccagttgggtcaaacactattgcatgtatcgaaaagcagcaaagaagttcaacatgatcccatttgagcacagatctggagggaaactttatagaatggctgagtgtgtatatacttatcctgtaggttttgagaatgttcaaaatgattatttgcagggggacggagaggtgttctttttgaaagaatgtaccaagaggcatactgactccattgacagaaggttttgttttgacatagaagctgctgatcgg

SEQ ID NO: 2117 - protein, 336 aa, Homo sapiens
MSGLGGRQHSRPISHPDVAGLSVAQRKFAHSLRDFKFEFIGDAVTDDERCIDASLREFSNFLKNLEEQREIMALSVTETLIKPLEKFRKEQLGAVKEEKKKFDKETEKNYSLIDKHLNLSAKKKDSHLQEADIQVEQNRQHFYELSLEYVCKLQEIQERKKFEFVEPMLSFFQGMFTFYHQGHELAKDFNHYKMELQINIQNTRNRFEGTRSEVEELMNKIRQNPKDHKRASQFTAEGYLYVQEKRPAPFGSSWVKHYCMYRKAAKKFNMIPFEHRSGGKLYRMAECVYTYPVGFENVQNDYLQGDGEVFFLKECTKRHTDSIDRRFCFDIEAADR

SEQ ID NO: 2118 - DNA, 3024 bp, Homo sapiens
atggggctgcagcccctggagttcagcgactgctacctcgacagcccgtggttccgggagaggatccgcgctcacgaagcggaactcgagaggaccaacaagttcatcaaagagctcattaaggacgggaagaacctcatcgctgcgacgaaaagtctgtcagtggcccagcggaagtttgctcattcactcagagactttaagtttgagtttatcggtgatgctgtgacagatgatgaacgatgcatagatgcttccttacgtgaattttcaaattttttgaagaatctggaggaacagagagaaattatggcattaagtgtaactgaaaccctgattaaacccttggaaaaattcagaaaagagcaacttggagctgtaaaggaagaaaaaaagaagtttgacaaagagacagaaaagaattatagtctaattgataaacatttgaatttatcagcaaaaaagaaagactcacatttacaagaggcagatatccaagtagagcagaaccggcaacacttctatgaactgtctctcgagtatgtgtgtaagctgcaggaaatccaagaaagaaagaagtttgagtttgtggaacctatgctgtcattttttcaggggatgtttaccttctatcatcagggccatgaacttgccaaagacttcaatcactacaaaatggaactacagatcaacattcagaatacacggaatcgatttgaaggaacaaggtcagaagtggaagagctcatgaacaaaatcagacagaatcccaaggaccacaaacgagcaagtcagtttacagccgaaggctacctgtatgtccaggaaaaaaggcctgctccgtttggttccagttgggtcaaacactattgcatgtatcgaaaagcagcaaagaagttcaacatgatcccatttgagcacagatctggagggaaactttatagaatggctgagtgtgtatatacttatcctgtaggttttgagaatgttcaaaatgattatttgcagggggacggagaggtgttctttttgaaagaatgtaccaagaggcatactgactccattgacagaaggttttgttttgacatagaagctgctgatcggcctggcgtttccttgaccatgcaggcattttccgaagaggaaaggaagcagtggttggaagctctgggtggaaaggaagctctgtcccatagttttaatacagccatcatcccaagaccagaaggaaatgcacagttggataagatggggttcacaattatcagaaaatgcatcagtgccgttgaaacacgagttgtgggggtgagttcaaaggtccagagacttctgagtatgttgatggatgtaaaaacatgcaatgaggtggacctggagaattctgcagattgggaagtgaagacaataacaagtgccttgaaacagtatttgagcccagaatctcgtgttaatgcgatccatttcttggtacacaaactgccagagaagaataaagagatgttggatattttggtgaaacacttaacaaatgtttcaaatcactccaagcagaacctgatgactgtggcaaacttaggagtggtgtttggaccaactctgatgaggccacaggaagaaactgtcgctgccctcatggacttgaagtttcagaatattgttgtggaaatcttaattgaaaaccatgaaaagatttttcggacgccgcccgatactacattccctgagcccacctgcctgtcagcatcacccccaaatgcgccaccaaggcagtcgaagagacaaggccagagaaccaagaggcccgtggccgtctacaatctttgtctggagctggaagatggtgacaatccttacccttccaaggaggacacccctaccagcagtctggactcactttcctccccgtctcccgtgactacagctgtccctgggcctcctggaccagacaaaaaccaccttctggcagatggagggagctttggagactgggcatccactatgccagacccgatcgtctatggtccagtggcttaacccacagtctccaaccacaacaagctccaactcagctgtgacacctctttcacccgggtcgtcccctttccccttttctcctcctgctactgtagcggacaagccacctgaaagcatccgcagtcggaaggctcgagccgtgtatccgtgtgaagcagaacacagctcggaattatcttttgaaataggagcaatttttgaggatgtacaaacctccagggaacctggctggctagaagggactctgaacggcaagagggggctgattccacagaactacgtcaagctgctgtagctcctggcctcagagcccctgctgaccctggcacccagggacctgcctgggggcagagagctgtcttcctcctccgaggctctgggctgcacccacaggtacctccacacttgggagttaccatcatcacagtcagccctgggggtggggggtggtgggcagggatgggacgcaccacacagaactgtgattgtggatcaggaggggaatgtcaggattcgcaaaatggacttttcatttgtcaagtattgggacttgtgatttttaattatccagcatatagaatgagagggagggcagccttctgccacctgtgtcgcctccactggcagtcacgccaccagagccaccctggctccctctcctccctgagcacctgctgctgcgattttaaagggaactgtactactcgcagtgataggtttgcagagtgtgtgcttggctgtggcagcctagcttggagaagctgctgttggtgcaagggagatggtctcaagtcagagggaagcagagacgcgcgtctcaagcctgcccttcctagacggccacctgcaggaccccacactcactgcactggcagcgtgcactggcgtatttgtaacaggcttctcggtgctcctcacccgtgtgctgttttccaaacaccacctttttgcctcaaggtctctgtaaatgaaataaactgtaatttacta

SEQ ID NO: 2119 - protein, 675 aa, Homo sapiens
MGLQPLEFSDCYLDSPWFRERIRAHEAELERTNKFIKELIKDGKNLIAATKSLSVAQRKFAHSLRDFKFEFIGDAVTDDERCIDASLREFSNFLKNLEEQREIMALSVTETLIKPLEKFRKEQLGAVKEEKKKFDKETEKNYSLIDKHLNLSAKKKDSHLQEADIQVEQNRQHFYELSLEYVCKLQEIQERKKFEFVEPMLSFFQGMFTFYHQGHELAKDFNHYKMELQINIQNTRNRFEGTRSEVEELMNKIRQNPKDHKRASQFTAEGYLYVQEKRPAPFGSSWVKHYCMYRKAAKKFNMIPFEHRSGGKLYRMAECVYTYPVGFENVQNDYLQGDGEVFFLKECTKRHTDSIDRRFCFDIEAADRPGVSLTMQAFSEEERKQWLEALGGKEALSHSFNTAIIPRPEGNAQLDKMGFTIIRKCISAVETRVVGVSSKVQRLLSMLMDVKTCNEVDLENSADWEVKTITSALKQYLSPESRVNAIHFLVHKLPEKNKEMLDILVKHLTNVSNHSKQNLMTVANLGVVFGPTLMRPQEETVAALMDLKFQNIVVEILIENHEKIFRTPPDTTFPEPTCLSDPNAPPRQSKRQGQRTKRPVAVYNLCLELEDGDNPYPSKEDTPTSSLDSLSSPSPVTTAVPGPPGPDKNHLLADGGSFGDWASTMPDPIVYGPVA

SEQ ID NO: 2120 - DNA, 1468 bp, Homo sapiens
aatggattttgggctctagcctgtcttgaatgaactccaaatcaaatgttgtggtgctggtttactggagtaacacacaggtttctgttcatggtaaataattcctgtcctttatgctttgttggaagatttttcggacgccgcccgatactacattccctgagcccacctgcctgtcagcatcacccccaaatgcgccaccaaggcagtcgaagagacaaggccagagaaccaagaggcccgtggccgtctacaatctttgtctggagctggaagatggtgacaatccttacccttccaaggaggacacccctaccagcagtctggactcactttcctccccgtctcccgtgactacagctgtccctgggcctcctggaccagacaaaaaccaccttctggcagatggagggagctttggagactgggcatccactatcccaggccagacccgatcgtctatggtccagtggcttaacccacagtctccaaccacaacaagctccaactcagctgtgacacctctttcacccgggtcgtcccctttccccttttctcctcctgctactgtagcggacaagccacctgaaagcatccgcagtcggaaggctcgagccgtgtatccgtgtgaagcagaacacagctcggaattatcttttgaaataggagcaatttttgaggatgtacaaacctccagggaacctggctggctagaagggactctgaacggcaagagggggctgattccacagaactacgtcaagctgctgtagctcctggcctcagagcccctgctgaccctggcacccagggacctgcctgggggcagagagctgtcttcctcctccgaggctctgggctgcacccacaggtacctccacacttgggagttaccatcatcacagtcagccctgggggtggggggtggtgggcagggatgggacgcaccacacagaactgtgattgtggatcaggaggggaatgtcaggattcgcaaaatggacttttcatttgtcaagtattgggacttgtgatttttaattatccagcatatagaatgagagggagggcagccttctgccacctgtgtcgcctccactggcagtcacgccaccagagccaccctggctccctctcctccctgagcacctgctgctgcgattttaaagggaactgtactactcgcagtgataggtttgcagagtgtgtgcttggctgtggcagcctagcttggagaagctgctgttggtgcaagggagatggtctcaagtcagagggaagcagagacgcgcgtctcaagcctgcccttcctagacggccacctgcaggaccccacactcactgcactggcagcgtgcactggcgtatttgtaacaggcttctcggtgctcctcacccgtgtgctgttttccaaacaccacctttttgcctcaaggtctctgtaaatgaaataaactgtaatttacta

SEQ ID NO: 2121 - protein, 217 aa, Homo sapiens
MLCWKIFRTPPDTTFPEPTCLSDPNAPPRQSKRQGQRTKRPVAVYNLCLELEDGDNPYPSKEDTPTSSLDSLSSPSPVTTAVPGPPGPDKNHLLADGGSFGDWASTIPGQTRSSMVQWLNPQSPTTTSSNSAVTPLSPGSSPFPFSPPATVADKPPESIRSRKARAVYPCEAEHSSELSFEIGAIFEDVQTSREPGWLEGTLNGKRGLIPQNYVKLL

SEQ ID NO: 2122 - DNA, 52815 bp, Mus musculus
  misc_feature (1)...(52815): n = A, C, G or T/U
cagcaagttttatttctctcacctgtgcaggaagtggcctccacccagcttgactgaattaggagggaagtgattttttcaagtgataaaaagaaataaaattccttgctcttcccacaggaggggctcaacaattggaagagtggcgtgagaccatatgttggtttgcagaaggatataactcgtaaagatgtttcctttgatgcctgtgatgaacgtgcatgtttcccctctagaggggcctgattaaattaagcaattaagagcggagctgaaggctctaaatatagggagcgagttcaggctgtcctgccctgtgtacaccagcatgcagcacagatgtggctgttgttacaaacagcacctgccaagttcagcagaaaaacagacactcatgttctgaaagatgtgagggagggggtgagctggggggagcgcttggatggtcttcctgcctgtgctcaaatcctggcctcagtggatttgctctttaaattccttgctttttaaaaccccattcataaatttttcattttctttcttgccctttttgttttgttttgttcttttggggtcccactatgtatcccctggttggcctggaactcgccaagtaaaccttgaactcatagagatctgcctgcctcggcttcccaagtgttggatagaaccaccaaacctggctgattactggacttttatgtcaataaattctagctgaagtgtaggttccagagaagttacctaacttctgagcctccagactcttagtagaattgagatagtctgtgagatgtagagacagccactgtctccccagatgggagctcagctaacagcagagctcctgggcctgagaggaagtttgtcccacttagcctgctgtagactgtaaaattactgttgaagataaaggtccaagaagagtgcttgttgttgttgttgcctgtttgctcattcatttgtcttatttgggagacaactaaggggctcatctttcctgcatttcaggactgagcacccaggtgaactttttcaggagaggtcaggggtttcagagtctgcccaaggttccttcatgctcattaaagaaagagcatccagtagggtttagggaaatgccaaggagatgggggacaaggagatggaggaaagccaagtctggtggttgaagttggggacagtaaggaaactttgtattggctttaatctcctcacccaaaaaaaaagtcattatctaaaaccaaaaaccaaaaaaccaaaccaaaacaaaacaaaaaaccccaaacaacccaaaaccttagaacttgctattgcctacggaatttgagtgaaatgagccaggccatcctgtttaagcctagatgtgttgggggaaatttttgtgtatgcagagggtagagttttctaatatacgaaagctacattgagacacacacctgatctacatatttaactacagctgtgtcctgggaagccctgttgtggagatgtctgtaaattctttgattcatcaaggggacactccttgtaaagtcagtgtcacagtgttacagtgtctgaggtttgtaagtggtaatctgggacccacactcttctctctgctgatttctaagtcttgcacttaatcagcactccgagagaccatatggccatgcctgatagcctgccacactggaagactggctggtaatgcttgcaccttaaaggcagctgtaccagctgggctctctctaccccatggaccctcttctttcattacctactacctcttccccaccagggaaaatccaactctggaaaggacttttttttttttttaaatgcaaacaaggtaaactacacaccatgtgtcccaagattgagtagattcctgtgatctctgagcatccttacgttgttttcttatacaggaattttgtagaaatatatttcccctagggacttggccaagagttcataaagtcgttaaaacgtgcttccggggccaagagaggctcagtaggtaaaagcgcttgctgccagaatttcacccacgtggtggaaggagggaactgacccctgaaagtgacctctgacctctgcatgagcaaggacggatgtgtgcacacattagcatgcacacaacacacactcgcgcgcgcacgcgcgtgtgcacacacacacacacacacattacataaatgtaattggaaaaattaagttagatgccacagagggagtattgaggggttctataacttttaacttccttttgttctagaatttctctctggctttggttagcaggaagccttgctgtctgtttgaccccagagagtccttctggggtgtcttgagagttgagtgctgttttcttgaatgggatgagcaaggaatgagcaggcagttcacctggctctgcccacagaggaaaccccctcatagcacttctactagaaggtgttctttgggcctaacatagtgaggtctgccttcatttttatgcttgtcagttgagtcgactggcagcttcaacttatcttttctcctgcccgccttaccttttcccacctgacagcttcttctcctgcccgccttaccttttcccacctgacagcttcttctcctgcccgccttttcccaccttttcccacctgacagcttcttctcctgcccgccttttcccaccttttcccacctgacagcttcttctcctgcccgccttaccttttcacctgacagcttcttctcctgcccgccttttcccaccttttcccacctgacagcttcttctcctgcccgccttaccttttcccacctgacagcttcttctcctgcccgccttaccttttcacctgacagcttcttctcctgcccgccttaccttttcccacctgacagcttcttctcctgcccgccttaccttttcccacctgacagcttcttctgcttgttgggagagaggggatgcgactgccaggtggtgacacactccacctcctttctgataataaaacgtagccttagttcagactcagtatgtagactaggctgtcttcaaaccagagagtcccatatttctgcctaccagagttcccagatgaaaggggctcatgattctgcctcactattcctctcagcccttaatccatccgggtccccaacctatcggaagggctgcccacatcagagagggctcctaccaccctccgagaatcttccttgggaaattccctgacagatagatagatagacccagaggtgtgggtaactgatttaggtacttcttaacccagtcgagttgacaatgaagattaacttacaaaagctgttgtctctgtcaggtggtggggatgtggctggcttctgttgtctggcttttcaagtaagaaacgcttgactctattgaaagttttagctctttggtcttctgaagttctgcttaacccagtggcctaatttcacacagccttaatgattataatagtggttttcatgcccaccttctgacttctgcatctgattctgaccaacaagactcattgtatttttttcactgaattacaggttcttagtttttggttttttggttttgttttttaatgttttataacatgttcctggcagtaagcctgtgaaaaaagaaaatttccttgtgaactttgtctttggactctgcagcatctagtcctgtgttaacatgtggtttctctgcgtgtgaggaattacatttttttaaaaatctatttctgaataatgaaagttaaattataggcccctgtgtgctcgtctttgcctctctttgatgttccagtttaaatatttcagaggaagcaagttaaaattagattctgggataggttggccctgcctttctgtgctgattcagagcccacccccacccccaccggccctggtctataccagcagttctcaacccatgagtcaggacccctaggggtggggtgagcaacccttttacaggggtcacttaagactacaggaaaacagggatttacactacagttcataacagtagcaaaattacagttatgaagtagcaacaaaataattttatggttggaggtcacgacaacatgagggactgtgttattaaagggtcacggcattaggaaggctgagaaccactgttctgtccagtggatctctcagatgtacatgctgctgtgatgtccagggtctatggcaagatagttttccatattaaaaatacaaaggacacagctctataaactttctatggatcatgtttattctgtatgtcagtgtaaaatggtggccatggtgtagtcggaaaacagaccctgaattggtttgagttactagaaaatatctatcatatatatatatatattggatcaaacaaaatctttttaagtttttttcttgaataacttacccagctgttgttaagcagtttcagagtaaagttaatcaatgccctgggctttttgttctgctcagtccccttgatcactatgtcttgataccatgctttagttaagacggaagggctgaaccagagggtaagaactgggggaggagtgggccgcctgccccgtgcacagctgagctcttacctgtcagttacttgtaaaggcagtgtgaaccttccatcttctttttctcagttttaattataccctcagtgcatgcattttgtctagtccactgttttccatgccaggataagaattgacaaacagcctctacatccaagctgaaaccatgacggcagtcttcgcctcatttctctccttcttattaaagacaggccttcacacagatgcagatctccaggtccaggcttctgaggatcctgtaaacctctgcaaactgcacagctttccagactgttcatatcagctcttggttacatacagcacctaactccgtaaggatgctcgtaaagaggtctgctctgagttgctcaaggaaagtgaaaatcttccatgccaacacactttcaaaatgaatatgtgtgcttatgtgcatggtatgtatgcatgtggacacacacagaccatagtgcatgtgtgtgtgtgtgtgtgtgtgtgtgcgtgtgcatgtgtgtgtgcgtgtgtgtggttggttttctccttccccttctacatgggtccaggggtcaaactcagtgcttgttgggggcaagcacttttacccaccgtaccatcttgccagcccaccatcgattttcttgaaatatcaactgttggttgaattcacagatgcagagttcatagatgtggaagtcaactgtgtcttccgatgcaagctagaatgactcttcagagtttctgaaggaattcaaggcattgattgggagactgcgttttggtggtgtttacacagttaggtaatttcgtgtttctttacgagatgagacgcagataagaaaatgtccatggtgcagttggctgatttagtttcctctgacacaaagcaaattacgcagcaattaaaagtatttaaatcaacgggcagtggtggtcccagcacttgagaggcagaggcagaggcaggcggatttcagagtttgaggccagcctggtctacagagtgagttctaggacagccaaggctacacagagaaaccctgtctcgaaaaaccttaaaaaaaaaaaaaaagaaaagaaaaagaaagaaagaaagtatttaaatcccacttcttctaacataaggaataccatgtaagtttcaaagttagccatttaaaaatgaatagtctaatatccgtgttagcttccagtggctgagactttataagaacagttctgaattaagaaccttttttttgagttatccttttaatatttctggagctagatcacactgtcaatccaagtatgggttgggggatgtgcactcgggtgcaggtacctacagaggcttgaggctagacacattgggtttccctggggctggggtgttagttgtgagccactggatgtgagaggctggaacagaactctaggttctgcaagaaaagccccagctcggaatgctgaactatctctcctgcctcctctcactcatctgtgactgtgtctcctgaatgatgtgtgtgtgtgtgtgtgtgtgtgtgtgtgtgtgtgtgtgtgtgtgtgtttgtgtgtgtgtgtgtgtgtgtgtgtgatgtacctgtgtgtattgtttgattagcaaatattcacataatgaaacttcaaagactgattggagcatatggggaagtgggcgacatcttctgtacaccctggctgctgttcactgttggcagactcacaaatcgtccgctctctgttgcccacttgctctgctcagtgttctctaagcagggtttctgagcagaggttcagggctgataacagtcgacactgtggatgtgtgcgttgctgttttccagtgataagtaattctatgatgagtatcttggtgtgaattactttcccccttttcagtttagaatattctttctctacagttaagtctaagcttgtgatgaggcgacagggtcgggtgcagtgttcctcattggggtttttgttgttgttgttgtttttggtcagtgtgaaatgtttgtatttgcacaggagggaaggaaatctctgtgtgctgactcatgtttttatgtttcgcgttaaactgataaggccagttagcttctgatataaactaaggcaggaagtacaaaaagggacagaaggaaacccttctggtcgtctggccgagtgtataaagctcactttggagtgtgaggtagattgcctggaaatctcctcaggctgtaatttttatggctgccatgctcatattccaaggcttgtggtctttttggtttaattattgtgagcaccgttcagaccatgactgcccaggtgaacaccgttgttcccagtgtggtgtctgcagaaaccctactttcttgaaggtactgtactgccttccctgtgctcctgagtcagtcaggcttcatttcagcctcccgataagatgctgtaccgccctccccagtcttgcccctctggtcttggcttctgtgactacacgactgagccctaggattcctctcccatgtctgagagcaggcaggttaggacttttaactgtctgtgcagtagacttaggcaaaaggggtttagaccttggctctgcctcgcgaagattggcttgcgagtagagccagcgtttaaactttaagctctacttcctcatgtctgaagtgaggaaaatggaagtccctttgtaggaagtgctcacgacactgtctgtgtctctgcagaagtctacagtccttcccaggctcaggctcctctttggaaaacttcctggaaaccctggagttaattcttcactcctttttgtctttcctgtttgactttatctgttcaagcttaagcctgagtagcctgtgatgccccaagatcgagactgatagttggggtgcttccagctgtgcagcatccttctgctgcaccccgagaagggagaggactgtggagagtttagtgggggctttattgccatgcctgaccccctcccaatactgtactgtacaatttaagactataggacacacacaagcatcagcctatactccgcttctgcctgtttgacgacagtcaccacttcctgttagttacccttggaactgtgtcagcattccttctgccagaggccagggagagcggaggagggctcagtgcagccctgtggggctggcatcgggtgggccatctgctccatggagttacttcaatgtcttcacctcattcttcctgggagctttcagggtattggtccctgcctctgctctccagtctagttcagttccaggtatgcatggtagctgttttgaggggaataaagatccagggtggtgattctcaggtacctcgtgcaccccaacacactcatggtaaaggtatggtaaatcctcatcagaaaagaaccctaaggtaactttgagataaataatccttcttatttgaaagtcagttattaaactattaaaattattattattatagaaaagggctgggaaaattcaaggcctctttagttggctgctggaggcccagaaagaagcagcctttacagtttttacagtctttacaaaacatccccaaccccaagtcttcctgaacagagaattaccgtatcagtaggtgctggctcaccaagggtgacttctgataatggctaaactttgttttctttctccttccctgctaaatgaaaacttcagaataactggtaaatttgggtgtctccccagaaaggagaagtggatctctcttgccggatggatggcaagctgttgctctttcagggacttgggaatgaggaatcttcttcatcttagtctaagttcttcctggagccaagtctctcatcagacatttacagagaagctgtccggtgccaggtaccacgctccacagatggagcagccaggtcacttactctaggaatgaagatggaaacgcagattatcccagttagctgtggtgaccatctgtgaggatcaggaaggtttcccccaatctgttcctgttactgcttatttgcgatttttctatttttatagttttctctagtgtactttaagaaataatttctagattgcttgtatttttctttgagcttaaatcactgtccacctccccatgttgggtacgaagaacatagatttctggcttttcccccctcttccagtaagtgcactttagctataaatttccatgcgattatggcttgccacaccttactatttttgatatcatatatttataatcattcagttaaaatatttcatctctactgtagtttcttctttgactcatggttaaaacctggttgcttccaataacaatattattgttgatttcttagctatactaagactgaggggtcttactgccgtttattatgcgtggttgtgtgcacatgttgcagacatcaagaattgtccgccttggttgttttgtttattcattatcgggacagagtctccctgacctgagcttgccaactggcaaggtgagttcagagactcacctgtgccccctccaagtggggtgacaagcagagtgtgctcagagtgtggactctgagcatggagctcaggcactggcgcttagaaggaaggaaggcgctttagtcacgagtgggctcctccaccctagcagcttatgcgccaaagatttcttctcctttttcacatgttggttttgcatataaatttggtaattttacactttagtcttctgtatctgtcagctcttgggtatcagttaattgccagtctcccaccaggagtgtcagttgctggagttttgattctttgcagttttgtacctgatatctgttgagacttgtcgctttcgtttacatatgaggtggtgatatgcaaattgcccgagtgagtggatctttgtgcccgaaaccctcacatgacctttgtccagggcttgggtgctgctgtgaacactctcttcccttcctcttgtaaaactgccaatcctgctgcctcaaggccccacccacccttataatctcatttaaccccagtgagctcctcagaggctccaagcccaaatacagtcgagcagagtgggcactacgcctttaacgtatgcattttaggagaacggagcccagtacctggcgtcatagaacacaaatgttcatgatctcagcatgggcttgcatctctctaatgaagtcaccgagttgtgaggctgaacagtgtacgccaagcatagactacctgtacaaagacagacttaggtagttactaccggacacacattaattagctaattgtggcacagttggagctaattttaaagtcagcttcctgtcttgtcttttgcaggcgctaactgggatcctcgctggaacaggagggacagtattttctacctttccaaaccgcagaccaagaagctaaggagaatctatgtaaatatactgaaatctctgttggctctgcgcccaacaccccggagctggcacctcaccctgtctgaggagcgtgtagaactagaccagccgctatgaatgtgaccagcttgttttcattcacaagtccagctgtgaagagactccttgggtggaaacagggcgatgaagaagagaaatgggcagagaaagctgtggacgctttggtgaagaaactgaagaagaagaaaggggccatggaagagctggagaaggccctgagctgccctggacagccgagtaactgcgtcaccattcctcgctccctggatggcaggttgcaggtgtcccaccggaagggactacctcatgtcatttattgccgtgtgtggcgctggcccgacctccagagccaccatgaactgaagcctctggaatgctgtgagttcccatttggttccaagcagaaggaggtctgcatcaacccctaccactataagcgagtggagagcccgggtgagtgacagagtcctgagtcccactgagatcaaaacaaaagcacctttctgtttggggttgtaattctaaaatatttggggggaaattctgtacgtatttgtacctgtgtgtgcaaaagagaaagaacgcaggcatgctcagatgtccgtcagccttccctcgctgtaacaagcacctgtagcaatcactgggtagagagaaaagcttcattttggtcatgagtttgaaggcttcggtccttggtcccatcagccctgtcctctctggcatcctggggtggaatgagtggcggagcagagctcatgtctagagaggaaggagcttgaaccctctccccctcagtgcctgggatattactcatgaggctttggggacaagccttcagcacttgaacactttaggagtgctttccaggcccacattttaacagccctgagtatttcgtgcatgctaacagctcccttctctctaagtgacattcttccttaggaacaggttctgaaaattggattttgtgtctgaatttgctttgaatggtgcacattggctttgcgtttctctctgcaagtttatcgtgcagtgcatcaagagaagacaccagaagcataggtgctggccctgtgctcgcaggaagggtatcacactggggagggggagcgaggtgcagccgtgactagagccaggtcatgtctcctggcaacgccttttgtcatccgtgtggaagtgtgctgcggtgtgttccctgcagctctgttctgtgcaaggatttgatgctgtttgcgttacaagaatctctgtcatgtcagatatggcactgagatatggtaaaagttgtatggtcaggtttctgaaatcatatacagaatcagctacagttaaaaatgatcggcaaaggaactttgtctgtattgagtaagctaacccttcctggtactttctctttcagttttggtggttgaaaaagtcagtgcactcccgttgcttctagggctcagaactctgctcagggctcagggctcagctgggcttcctcttctaccacaggcttctaggaggttggacagccaccttgtagagatcagggcagtacctgggcctggtgctgctggagggtgactgcgagctcttggtgctgacagtcctcatatagtctggcttgcactggcgagcccagctctttgaccacacagcgtcgcctcagcagggggctccaatctcagagtcttgggagtaaatcagccccattatactggaaggagattggggtcttccgatgatgaggctgggtgctgcacagctgttcagttctcttgatcaggagccattgcagacagaggagggcagaagcccctcttacgctctgaacaaccaagtgaccatcttcatggcattcataccatgtcaggcatcgtaagtgattcgggggtgatttgacatgtagggcagatgatacagcttccacattacacaagggcttgagggtatgagagggagtgcctgtgcggtgccagtctcccgtggatacaaacctctacatctttaatttatagagtttgcccctgagtttgagtctacattggacaagtggttctgtattgaagccttgagatgcttcgctgtcgttcgcaggaggattgtgtgggttgtgtggattgtgtggatggacttgctcacttaactcgtggtttatggcatcaaaattatgtggctcccctccctgttcctgcttctgggatggccaggtcatctccttctcgtacaggaacttcagaccccagggaaagaggagttgttcagtgagtgcagacctacaatgacgcgtttctctctaaaggcattttgtatttttgtgcagcatttaagtcacgagaaagtaaaggccaggaataatttgcaagcaggaaagagagcatataaagttaaacgaggtgtggtagtataccccgttagtaaccgccattcggaatcgcacatttatctccatgcatattttatgctaacacatcgatccataggaacacatatcactttgtgtattttaagatattctacaatgacattagattttcctggaactgattgctgtgttcaatccatagtgtgttgcatgcttctagaacgtacgtttttaggattaccttgtctagtgctatgaagggccttcccctctgctggaatttcatttgagaaggactgataacattacgccatcacatagtattacctagctcccttaagtgtttgccataccctccttacataccttctggctttatttccaggtgcctttcttattggaccctttgaaagctgcactgctgttctgggctaggactccatttgctcctttccctggccttgctgggttcttcttagctctgcgattctttactctttgtcaaaccagatgggaagtgggtttctgttttggtttatttttaggaacatctcagatgcaggcacatggttttcttttagccagaaactgaaatggagatgggattctcggcgagtaaaaagtatcgtgcagatattatatacaaattagattctgggtacatgtgtttcggcggtcatggtccacagggaaacttttaatgtcaggtaagtaatgaaaaggagcctccgagtcaagggacttccgtgtcagacatctggaaagcagtggggtttgggcacgggacgtgctctcacacctaagggattgttaagaacaccccactctcactcgtggtgccagcattttgtcctgcgctgctgcatccccgccccgtatgtaaactgcttacgacaactgtgcagcccctgcagctgaggtccactaagaagtggccgtgattgaaagggcctctttccctttgctctttagcagcgctctgtgggttctggcttctgcctccttccccacttctttcccactttgtccatggctgtgtacttgtgttctgtgtgtgcctttccacctgttcataactccttcctcctccctcctgggccagctcgcttctcttcctcttccatatctaaccttgcagaggtctgtttaggtgggactcttctttaattctgctgattttgtgccccagagagactatgcttttcccatagcaacctgagcttcttcataataaacttcagagccagtactgttcagctgggctccgtgagtcaacaaagtgttaggtgggcactgtgctggtgtctcacagctaccacagtgacactgatcattgtcggtcactgaatacgctgtgactatcttattcatatggacatctgtctttctagaggtgggttttccatttgtctgcagcctttgaaaaccatcttcctcttaggtcctttccttgctcgctcgtgtaagataaaaagggaaaccattcctggccaactctagttacttagtaacttgctctaacataaaggtttgatgaggaggcggaaggctggccaaatatgagtctgggtttcatgtcctttctcttcctcagccaagaatgttaccagccactcacagggcacttctggaaaccccttgagggtaaggaaaagatgtatttgatttaaatagaccaggggtttcctttcagttttcatactgtgaagtggtaatatgccctcgtagagtgcatgtgtgtgatcacatgacagctgtgcactgctggcactcagggttgagattcatgctaaggtcactgaaccgctggttaggtgcccggctagtcaagccccacaggccttctaggttctcccatctgtaaggtgcaggtgagttggtctttacatcattgagcatttggggcctttcttgttctgatacttgctcgttctaaatctttccttcagatagtcgattgatggacttctgagaaataattgatttctcttcaaaatctggccaggcagatttttgtcattgctcatttgagtatcttcactttttatttctttgccccaaagtcatcagtttaagtaattacagtttttctttaacctgggctgtgcatcttgttacacatcccagcactctgggaaatgttgcctcttgtgctcaccggagccccagagatgcttccttctgtggaaaggtcacaccctggccaccattgaaacgtacatctctcaagaaggcctttggagtgtcgtgtcgtgtcccgtgcgcccccccccccccccccccgcacacgtgtagacacttgcaggaagcagttctcagagctcccgacactacgacccagctgctgacgtcgcagtccaactgtttgcctggactttacaaaccttcagagtggaggctgcttattagtggttggattaaatattgcttctctttttattttcccaaagtaaatgctgaccaaggctgagtaagtcacctaattgtggtattgagaggaccattcagctgttgtccactgctcccaaagtgccttaatgggggtttcctatccagtccactgactctctctctctctctctctctctgtctctgtctttctctctctctctctctctctctctctctctctctctctctctgtttctctctctctctttctctctctgtgtcatgttcataaaaaatatttttgcactttgaacttcaccatggaagcccttatcaaactcaggtttaaaattctgagatttttgtcaagtgtgccagtacctgtaatcccaacattcaaggggctgaggagaaagattgtttggggccacatgccagacttcgtttcataagacactatcccctaaacaaataaagtttgggatttccattaacaatggaaatggaaatcttagcttagttggcagcctagttgctgctgtctgcttaaaagtgaaatacactgaaaatcctcctcctctgttggctgaatatgggcttcagctccagccattctgttcatcctgggagaaaatgctttaaatgttagagaactgaagaaagattcattatcgcccagcaggaacagggcaggggaagtagatactgaggaaagaggcgagctgtgtgggtcctgaggatgctggagatgttctacatttaacagttctgacgatagactctgttggtggcataaagctgtatatgaaactgtaatgatctcaactgaaatagcgttctgtggataagtgtccgttggtctcacaactcagtcacccagtgctctgccctcagacagccagggaccctgtcggatggcgcagaactgcctccatttagtcacaatggaggttgattttgattctttcctgggctcaagatgtgctaccccagtgctggcaatggtgggggcagcggtgggcggcggttccagtcacgggccagctattgaaaccccagggtggaggccgcagtgggtagcagtcacacaccagctaaccaggaaaccccagggtgccgcccagatgaggtgaggtttagggttaggtaggttaggcaggagtccatttccaacttggagtattttgactcagagttaaatctctctgcatctgggcaacagccaagcttgctgggtgggggggccagtattggcgttatctgaaggctttgaggttataagttagataccaagatgtgttcataacaaagattttgaagattggagataaattaactatactaacaaaagaaatgaaaacaaggcagcctgtgctgtgtcccaggacatctacatttctcttcctttttacatttataataaacacaggcgtctacaggaactatgcccaccagaagactggcatataattatagtagcatatgctaaattcagtgacaggtgtggatgaggctgaacttagctcataaacctcagaatagcaccgacaagacttcctcaatggagacacctgcacactgttcctgctaaccctggcctgtggtgcagtgcagagatgtccgtgaccactctctcatatggccactgtctcagagatctctttttatgtgtatgtgtgcatttggaggtcagccaatcttggttgtcattctcaggaacacagtccactttgcaacagagcctttcaccaaggtttatggacaccaggcttgactctcttggcctgagagtttcagggctacttctgtctttgcctacctacccagtttgggagcctgaggaattttaagtatgagtcattgtgcctggatgaattctggagttggaataagttcttcatgcttgcaagctaagcactttacccacagagccatccccaagcgtaagaagagggtttgaagggttctcttatgttgtagaggggcacggagtcagcacatgctgctgtacccatgcagaggccagaggatggtggctcgggagttggcttcctccttgcacctcatttttgaggcagggtctttcttattgtttctgcagctggaacacacggggcgctttgttctgtttcttctttaatgccagatgtggtggcccacacctgtaatcccaggaatcggaaagcaaggggaatcaggcaggacacagcatggagagacggcctcaaacctgaggccgtctgatgaagaaagtcctttaaacagaagcagactgtaaactatgcttgtgataggtcagacatccagaaactgcacatggagtatcagtgagagaggatcggcccacggtggactgggagagtgggattccttaggaattcaggacaggaaaggccatgtgaggaagataccagtttccttcagtaatgccgtgagatcctgatggggacaatggggttaggcttcaaccgccttgggcagtttggccctgagccacttacagacctgcgggggaagctgagggttgcgatggtccatctgtccaaggttgttgtgaagatcatattagtcacagcgtatgaagagacctccatactagtgcatacttgaaaatgatgtgatccacaagataaaggtcgctgctttcctccatacctcccatagaattaaatgaaacctgcaaaggaagcaagtcttcacaaagtgattagttctagaaaacccgtggcagtcactacattaaaatagtgacggtgaatcacggcagccagtgtttgtcctgagctccatatttactgccacacgtgcattctcactcacttcagacctaagaagcaggtgccaagggctggggagatgtagtgtcagagtaatgtacaacttgaaactggagatctaggatccaagttcaaatcccctgcttcccaagaaccaggaagcagttggctttctccttaacagaggagccagacatccagaagtatgagtattagggcatgtgttctaagatgcacatggcagcctgcctgtggcctgggctgagttgggagcacctgagcccgtaccctgatgggaacacccgagcccgcgtcctgtgtgtttaggaagttctgtttacatttatttcccatccatcagtgatcaaccttagaaaaccagagtctcgcttcccagaacatattcgttgggatccactttgaactcagaataagctaaaccgattaattgaactatgattgttagttaaacaaagcggcttggaggtcattgtcaacagaccagtggattgttaggtacctgagccaactgctcagaaacttccttaagaccacggtggtccagcttgaaccctgaccccactagacattagctatctaaccataggtgagctaacgtcttaggtaagttactcactcagtcttctgtatctccatttccacttttatcttaggatgcattctcatcagttttaatgtcctgtatgatgtctgtctgcatgtgcgtatgtgcgcgtgagtgcagataccttgtaggccagccacatcggatcccctctggatgagccgccggacgtgggtgttgggagccaaactccagtcctttctaaagcccgctggaatacactcttaactgccaagccagtgctccagcacctcagtttcttcattaggcaggtatgacttaggataatgtattagagcgtgactctaacatttgatacagccatcagcatgtgtaagtgatgtctgtctcagggaagtaccgttgttccagctctactattgaaaggaaagaaggttttaaaaaatctctcctgtttcttgtctaatgaagagttaaacaaaaccctgcgtttggaaagctaaagcagtattgttctctctcatgcattgccaacagtggtttttgtttttaactcctggtgtgataattttagcttatactctgaggttatcctctaccctagaagacttctgtactctcttagaacctcatgccttccctctgtggaagtgaagcaaataaatgtttagcgaaggaaaggaaactgggcgaagagaagaagcgggggtgggatcggctgatggggacactttcgtggaagtcccagcaagagcgtgtgctgcctaagttcatgcagtggggaccctgggccgccttgaacgacagcacatgttttgtccatgacccatgcagcttgaccaaagaaacaacactgttttgttgtgttgtgttgtgttgtttgtttgtttgttttacacgtttgtcagtgtgtgtggcggtctgagagtaactggcaggagcccgttcttttccttctactatgtggagtccaggaaccaaacaggttgtgaggcttagcaacaagtatctttacttggtttctccggcccctagacactgctttattgtgagcagtctaaggccaacctggctgttcccgtagcatactggtttgagtctgtattttacctaagactcagagctgccactgtatggggtcttagaaatgccaggagtcattgctaggtatttgacacaagtgagaaatttgaggtttggtttccatagctagagacatggaacaagaaacccgtgttctgtacccaaagcgcagtgacccaggctgagtccacccaagggtccaggttctggttgacgtcacagggataatgttcacaatctgctgttaagtcaggagcagactttggaaaagattactctatactatactacacagggcaggaactgtaataaaactctcaagtgtattaattgaaaacacattaaggactcttatatgtcagactctgggcaatacaaaagaaggaacaacagttccaccctcaagggcatgacactctaccagatgaggaagtcaggtgagagctaaaacatagctgttaccatagtaaagccttttacagccaccatggagcacagggaggaggtgttcctgctttcgtggacagggagcagggagggcgtctatgagagataaggagacagagacagcagaagcccagggtagccaggtgggaagggagggcttcccctagagacaggtcagaggagggacctcagtccaggctgcagtcatagccagcatatgtggcaaagtctcacagaaatacatttctcaggaatcagctgtggtggaccagaaattactggctcccattttccaggaagttgagttatatttaggctatttttgaagtaaactgaatgtttggctttttttttttttaaagttgatactagtattgaataaaattcatttctctacctgtgttcaaattgtatttgcgatttttttcttctatgaatatactatatacttcttcagagtaattgctacattcctacaaggtaaacactacagtatcctccttaggtaaaacagtctgttgaaaatatgattctccaaacaaccacctaagcatgggtgtgggaagacggctcagtcaagggtttactgtgtctggtcctcagcacacacaggaaaaaacctggcatggcggcacatggtggcaatcccagttctgggggaaagagacaggcagttatgggggctcgacggccaagccaaaacaccgaacaggttttgtgaaagagcctgtctcaagaaataaagtagacaaacaattgaggaagagaacctagtgtctgtttgtctgtctttgtctttctctctcacacacatacatacactctacccctgccttctctctctctctctatctctatgtctgtcatatatatacacatacaccaccaccaccaccctctttctcttacacacatgtgtacatataaaccacacataccacatactctcacactatacacatacacacacacacacacacacacacacacacacacacacacacgcctgcaagcgcacacacacccatcgcatgcaccccgtgactttcacaacctcctctcagttttgtagaactaagtagtgaagcctggtgcctgtgatcattctttcactcaagccttggcccctctttcttcaggtgctagatccaggatgagttacttagctggcctgagcctgcttccctaatgagttacttagctaggctgagcctgcttccctggagattacagttgtaagaatcaacatggagacaccctgtggtggagctgcgtcctccagttgacttttataaccacaactcaggaggccttatctattatttcaagccctgcccaccctcagctcaccaccagtgagcaaacaaaaaggtaaagggtttttagctgttgtttattgctgttaaaatttaaccttggttaagattcggggacccatttcttcagtttctgaggcatatcttgaagaaagggatttagttttataaacaaacatactattaccttgaaagccatcttacccccccccccacctctttacatgcatgatttctgctcacaaggtcacccagtacccttctcagggacatctgtcttacgtggctgctgaggcaacttgcccttttggtaaagttgttactgtaagactgacagctcttagagaaccccagtgagatgtcctgaggtctcgcctgaacagagctccgcacactgcggtgctagcattagatgtacacaaagtcattgcagaagacaaacaggatttagggcagagctgcctgaggaaagccagagtgaagtcccaacaagttgggtgatttgctcagagtcgaggtggttgtccgccgaggccccttaaccagggacctcctctcgccctgcagaacgggcaggaagcatttagtagcctgattgccattctgtcttcatggagaaacacagcaaagggactggcaacctcatcaccagagctctctgtgtgttaaagcagaaacaagctgccttttggagaacgtttggagggtcagagcacagttgaagagttgccaggtttagatgagaacacattgtcactgaccatttggtgtagaatttcaagccacgcttgagactctggacaaagctcccatctgggatgtgagggtgctgtgcgctctgctgtataattttagccgttcttggtcatttctttcccatgcgccttggcaacgtagtcaagcagagcccatctccttggacggcagcatcctgcagtttcagtcgcggtttggttgtcctgttatctggaaaagggattttactttttcatggaaggagatgcagagttgaaaagcagagttaacagtagtagggaaaggaagaattctaactcctcccttccgaaaggtcaggaaaagatggaaagagagagcatcctacttttaaattcttagagagctggagagatggctcagtggttaagagtacaaactgccaagttcaattcccagaatccacattggacacctcacaactacctgtaactccagcttcaggaggcttaatacctctgattacagaggacaccagcatcatgtacagatgtgtacacagactcacacatatacacacaaaattaaataaaggttaaaataaagaattttgaaacatttaaataaagatgtggcagagagtggaatggcttagttggtaaagtgcttccggcactagcctgaggaccccagcatccaacagcagatttccctaggcggcacacacacacactcatgcacacacacacactcatgcacacacacacacatgcataaacacacactcacatagacagaaacatacacatgctcatacatgcacgcacaatcacacccacacacataaacacacacacagacttcaggtggttgtcaggtacatgcgaaaggctccactcatccaggcccccttttctggaagggcacagagctcagccaggcctgggtattagttaccagagttctctgaaccacacaacctggttatcttagagacgaagctttagtaaaaccaaccattaagcttcatatccaaggataaacctcagggcccaaaggcaaaaagaacagattctgataatgtttagaaagcaaatttggactctggcttctccaaagtatcttgtagaaaacagcatctctgaagacatcaggagagcagttccaaactagcatgctgtccgtaagtagcaagtttgaggtgcttggcgacttggacgatactgcatgtgtgtccctaaattcatgttgtaacccaaaccccaagtaccatggaatgtgagttttagagacggggcctttaagaaaaagataaagtaagatgagggcattgtgggaggccctaacatccttgtaagatgggctaagctatgcagagatgcaccaggatagtaggccaccaggagcagataacagaggcctggggagaacccttcatcatggacatggtctccatgatcacaggaaaatgaatttctgttactacagacaccactctttggtattttattacagctgctctgggaaactaatataggcagtgtctgcagatcacagagccaccatggacttgagctgactgtcccgtgcttttgcttttccagaactggggatgaacctgggctaggcagggactgcaccactgagctatacccaatggccttttcttcattttaactatgcatgaatgcaggtgccctcagagtccagaaggatccagatggagttatccatgtggttgctggaaactggaagaatggtgcatgctcctaactactgagcttctcttcagttcttattttgaacagtttcgctaagttgcccagactggcctcgaactcatttttgcagctaaaactagctttgcactgagtatcctcctgcttccatctcctgcccagctcttccttattgtaaagaaggcatttcagctccaagatattttcctgtgcactagtgaatggaatggcctctcaaaaaagcatcaagaacttttttgtttccaaaaggtaggcagagacgttaactaaagccatttggaaagagaagcatgcaccctgaacaccaagaagaaaaaccaacaggaactgggtgtcattgaaacccctggtggtggtacacacttaatcccagcactctgatcacagaggcaggcagcctccgccagacaaccagaacagccaggccaaacacgaaggtgctctctccttttcttaataaaatgtgaaaataaataaacaaccaaaaaacccaagaaacgaaatgatggcagggccacagagcagagcagaaggaaacgtctgagaaattggcagaacatacataggacattgtgagaaaggtcccctcagtccccagaacaacgatggactccctataatcagcggcatttaaggtggctggttaaacagttagaaaaagataaaattaaatgcattcctcgtaccacaaataaaactagcggctcagaaacctaaacaaattgggaaactctccatgccccagaagggaagggtatacagggatgaattcttccattcagtgtgggtatacaagactttatgactgcagattcaacacacacacacacacacacatacacacagagaggggggggggaggggagggggagnnnnnnnnnnnnnnnnnnnnnnnnnnnnnnnnnnnnnnnnnnnnnnnnnnnnnnnnnnnnnnnnnnnnnnnnnnnnnnnnnnnnnnnnnnnnnnnnnnnnnnnnnnnngagaggagaggagaggagaggagaggagaggagaggagaggagaggagagagagaaaccttgagctgcctgtgaggaggttagaatgagggaagtgagttggaggagacagggtgggaggtgggtgcttctgaccttcagagcacaggaagtgttttctggatttgaacaaagctctggggatgtcgctgaggactgacaatgaattgagcagataagcctaaccctggaggtgggagttatacccaaacacgttttgaacaaaaatgtaaatgaatccaagaattttgcatataaaaccaaccatgcagttttacaacatgttgcttttctctgttattttgggccacaagggcagaagggcttccaaaggtctttgtcactaaggggaagctacctggtgactctggagaacatcttggggtgtgataaaattccccagggtggggttctatatgttacaggcagcccatcccatgcaggtcatcaatttggtggtggctctgccaggatttggggagttgaccacgctgatctccaccatcttagtttcttaacctgaagctttcaggagagaccactctttttttcttgtgtttatgtacctacctcttagcaaagtgtgactgtgccatctgggtcctccttgaccctgttttgtggataactggccatctcccttggcctttgggtgttccatgcccactgtgtttatttcttcaaccttcttcattctgctgctttttattttaaaaggagctaatgggtcaattaaaatacttagctggtaagtaatattcaatatcatttcaataactcagatgtcagcagactgtcaggtaagaagaccatcacaggcaatatataaatacataaacagggtagcccaggctggactccagcctgaggtcctgtggcctttaacctccttcctgagtactgggattgtgggtgtgtgccactgtgctgtgtgcctttgcgcgatatgtgtatggaggtgtgcacacgccacagaccaactttgtggaatctcttccatcctccctttacctgagttccagggatcaaactcaggtcacccagctgtgtgacaagcccctttaccgatgaagccatccggctagcccgtgatgtatattgttatctgtgctttaggttttgtgtgaataggaagatttaaagtggaataaagcaacatgttttattctaaaactgtgttctgagccttccctgggtcaacaggccaggggcgctgctctctggctggagtcctgtgattgggactgaagagtcactttccctctggtcagtactgtggaattgacagttgaggttctggtcatttgccctcacttactgtgaggtcgttaacagttttcaccgttcttatttgtctctctcgctctctctcttttcttcctgcttccagttctcccgccggtgctggttccgaggcacagcgagtacaatcctcagcacagccttctggctcagttccgcaacctgggacaaaatgagcctcacatgccactgaacgccacgttcccagactctttccagcagcccaacagccacccgttcccccactcccccaacagcagctaccccaactctcctggcggcagcagcagcacctaccctcactccccaaccagctcagacccgggcagcccttttcagatgccaggtaagagggcgtgtccagagattggggatggggtgtttggggaggtggatgggcgtggcctgcagggaggcagtctgatccctgagcaagcacccccccctccagcccgtgcttcagaacaacattgtagagagaggagtctcacagcccagacaagggacggcctgtttgattcctgctgcatttgccccttgttttcaaacgttttgaaacagctgcatccttctgggagtggcatggttgttccagcctctgctctccataaaagaaagagcgaaaaccacacagtgccggtctgagaagcggctccggacatcgaagagcccttgctgtcaatgcagacttggaagagctgttttctgaggggccccaactcccatttaattagattcatttaaccagtgatgtaatcccaacaagcctgtacttttaacaagggattgtaacagacatgctggagaccatctgctgtttaacttagcagagacagaaccagctattttcctgttgtagtcataatggatgctgtaatagttatcaaaatacgtgattaattagaacggtctagttttcaaattgcaggttagtaaacaagcatgtcaaatattagtgccagagtacttgccagtcaacagcaaaaggatcgtataagcagaagacgatcttggatctgggtattttgtgagggaagatgactgggcaggcaggcaggcttatggaaccacttaaagtgctttaggttaaattggagttcagcatccatgaacctgaaaaccttcggaaattgaagggtggtccacactttttgctgctgcttttttttcttttttaataattactcttatttttcaacctgttaattttgcattatgtctttctgtttgggatggagatggaagagagagtattttaataacgggacgaacaacactcgatggtttcctatctacccattccccggcaagcctgtagagtcagatggatgggttggtggtggcagggttcatttcagaggacttgagcaggggcaactccgggcgagccccagtgaagagaatcagagactattgctagaattcactcttgtccgtggctgccagggttcaaagcaccactgagaagagcaaagagaccgggcacgctctagcggagatagagcaaagagaaagggtgcgcactagcggagatagagcaaagagaaagggtgcgcactagcggagacacccgaacacgatcagtaaagacctggccacttggagccctgttggtgtaaactcatcggctctgttgagaacagcctcctggttttgttcctggcttgagcaaagtagacttaacttagagctgcagcaagaagctggagtgtggagagggcagactgcgaagtgcaggaaagtacctggagcctgcctggctctctgctccttagcagctaggctaagattctgccagggtcaggggtggcggcaactgccagggagccctgaaggagcagagtttgttatttggggtccacagttgcccctaagtatctacccaagcatttatgaacccctaaggtaaaattccattctcaaggctctgccgtacatgctgggtgggctgacaggccaatgaggaactggttttctgagtcctgtaagaaaataccagtcttgcattaatgtgtgtggtttcagtaatctcattacttactagaaactgttcagagaagatctatgtaaattctaaagcagaagacagctgagctaaactgatttctttcctactattctgttattggggatttttaggctagacattgcttaaatggttatggtgaaggtagtcctaagagattgcttaacgtcatgggaaaccaaagtctcaattagtaggccgtaacaaacccagacagtaaattcctgcccagatgtttaatgtcagaggcctgggaagaaatttccccttactaagtcttgtcaggcagtttggttacagcagtgaaaccaaactagtctgctgcatgagagtgtgcacacgtgttcttctcagtggatttcgaggggccatgatcctgcagagtcatgggggctccgggagcccacttacggcttatttttcttttcactgagatgtcactgggaacaaagtttggggctgtgatcgttttctgaaactgtaccttaagtccaatgtctttagccatctcatcctttgtggaggggtaaggggttgtgggtgaggcagggtctgatgtagccaaggctagccttgacttcttcttcatcctgcctctgctttccacctgccaggactgcaggcatacaccaccacataagcctgctcgttaaaagggctgattcagcttgagtgcttaatactcagggaagcagggacaagcagagccctggggctcactggtcgagcagtctagcctgcctgaagagtttcaggccagggagagtccttgcttctctcccccccccataatccccccaaaaggtgagaagctggttagatggctcagtgggtaaagacacttactgctattgtgaaaacctgaatttagtccctggaacctacatgttggagagacctaactccccaagttatgctctgatccccccatgttcttctcccccccacaataattaaatccaaagttatcttctgacctcctacatacatgtacacacacatgcatctgcgtacacaaagactctcaacacagaacagaatatatgcctgacacatgtattttctttttctttaaaactttgtagctgacacacccccacctgcttacctgcctcctgaagaccccatggcccaggatggctctcagcccatggacacgaacatgatggcgcctccactgcccgctgaaatcagcagaggaggtaaagtcggttgctgcttctccctcttagagtttattgtctgcagtccaagggttactttcagtcatacagaccttccaaaagtagctgtttatgaaacatacaaaaagcagttgttgttgttgttgttgttgttgttgttgttgttgttaacctaagggaaagaattctctagtacccagccctttgcttaaactctgtcacagtctcataagagacctcagattcaatacatattgaatgtattttcaatagcttaccaaatggccttaagcatcctcctgccattttgtactagaaagttaagtgaggctaagtctcagcattggtgattagaaaaccaagctgttggcaaactctgaagataaccaagcaggctgttcatccatcggtgctgaatattaagccgacatttattatttattttaaaaatgagcaagtgtatctatctcattagcatgctaatttgcttttaccttttgtaaatggttacataatgtaaacaaagaaccatttagaaatatatttatacgtgatttagtatcaataaatacgtgatttgtatagctgtttcatgtacctgcatacatatgaggttattggagagctcttgggcatgaagagctagaggggacaatggcgaggcctgtgttacataacatagtcctttatttagatggccgtgtgttcaggtcttcagtaattaataacttgggatcggtgctgtaagaattgtctttttaagggccaaggggaaacaggccatccacaggactgcaaagcagacttcccacgggtgatcccactgaaatccatacagctgggtttccaaacggttgtctttgtgttagagtagacacacacacacacatatacacacacaatgcgtgcgctggcacctcgtctattttatagctcttatccatcactggaacaatggtgcgttttcccgttctgcactcatgcctcactttgttaccagaagaatttacaggatgagaatgtatccctctcccctcaaagaatttacaattgaactgaaattcaccttccctccttggggaggggcctggtcgtcaccaccagctccatttcagcccagtaatgagctggcggatggccccacacacttctcaggaccacagtggcatgttgagtgggagcagagaaaagcagatgctagaatccctgaatcccgccccagacaccaggcacactaccgcatgccaagaggtgccatgctgccctggcaaggtctcccatccgctcagtaacttctgggaggggcctccggcaagcactcagcccaggggtgaagcaagttgaaagtaaaagccacgtgactgctgactaggttttattttgttcctaaccccactttcagtgaaacgagaggtgccttggcctgagtcagagttgctgatgttttttcaagacttaactattatgctgtccgtatggtagtgtgagggcaacagcatgccctgttcatatgtgttcagacccacagactaaccaagaacaagccctgacaccagctctggattcgggacgatgatgtgtccatgtaggctcctgaattatactgagtacaccaatctgatggcagatctctgtgatgggaggatgtacggaaagtctctgtgccaactttgcagtgacccaaaacgttggctccaaaaataaataccctttataaaacccttagctgtacagttaagtaaattggaacatacatgaatcagtgattgtgttttgaagtttcctttataggtgctctgtgttttatgggtcttggtcatcgttagatgttgggagtcaacaagcgaagagtgtgagagaggagcctctatctgacccagttttggaatttttatttggggagcaagataccctgtgtggaccctgtatctgtactgatgagattagctctaataccccaaatagagaccatacttttaagattttttttccttttaaacagcttttaaaatgttccctgttagagccaatttaaaatctccttgtatagtcaaaggaaaaaaatgatggcttttttcctgttgtcacctatggtggttttcccagagcaagggtcagcaaactacagcctgcagacagatcagccctctgtctgtttttataaataaagctttattagaacacagctgtgcccatttgttacatattatcaatggctgttttcgtgtgatacaaaggcataatggaatagttgtgctaaagaccatatgccccacaaaatctttctggccttttataggaaaaaaatgtgtctgagtctaaactagatgaatagcatttctaacagcactaagagctgataaaaggcttgtgtgactgtggccacagccgcctttgaggtttggcacttgtgaatcactaaagctttgcttgaagaacagtggagtaacaggggggaactgtttagaaaacaagcgaaatagtttattttcagctaagccacttaagtataaaatgtaactgaagaagaacatggaagcccttcttttttttcttttttttttttttttaccatgtctgctgaattttctttgcatttcttcccctttgtcatgaggccccatgaggttgagatcagtaattacgttggcaatagtgtggtttgtatgcctggggtctcaaaggcgggttaaaggaggtttgctgcagaaaggattcatctcccaaccttttggttgaaagcatttagaagtgttttctgtttggagattcgtcaggcttaagagatcggacttaacaagctgcatcctgtcggtgaagctgggtagtttccattgttggcccattctgggaagcgagagacaaaacacacctgctcggcatgacttagagcaaatagaaggaagttagcatggagtctggatgagagagatatgattcactgagggagaatggccagctggcaagatttcttcctgagctagaatcacagcagaactgcagccctggccatcactggctcctgtggagccaggcagcctctccaggataggcagaagttggttttggtgctttgggaaagcagaggcttaccaaggctctcccaaagcagctccctcccacaccagccctgctggcacacctccaggcccctcttgttcctgagccacttggtttttcattggtcacttgtatttctcgtaggtggtgtgcccacaagagtgattcctattattcctgtatgttaatgagcaagtaatagatcgttagtattcagcagacgctgctgctgggcttgcttagctggtattttggttttctgctaatcattggagaagattgttccccaattaaaggagaatgcacctttaataagaagtacttcagctctcaaaaaatgatacatgcgatcattgtagtcgcccttgcatgtcttctctgtgtggtgcccagccaggtttacagtgcggtttcagtttggggatgctccaggcgcaaaccttgagcaacacaacctcttcttcccttcttacagatgttcaggcagttgcttacgaggaaccaaaacactggtgctctattgtgtactatgagctcaacaaccgtgtgggtgaagcgttccacgcctcgtccaccagcgtgctggtggatggtttcacagatccgtccaacaataagaaccgcttctgccttggcttgctctccaacgttaaccggaattccactattgaaaacaccaggcgacatattgggaaaggtgagctttcccttttctctgcttgcaaacgttcgtctcttattcctctagaagtgactcagtcattcctgtggcaaatgccagtgaatgttcagacactgctatttgaagacattttccaattcatattattgaagactgtgctaattgatgatcttagtggttttttcaactctgataatgttgttaggaattagtgcatagtgtggcttgctactgtgggcagtactctgatgtttttgttataaaaatatcttattaagaatttttacatttattgcctatgtgtgcatgcgcctgtgtgcatgtgtacgtgtgtgctcgagggtcttgatcagaggacagtcagggagtcggttctctccttccatcctgtggccatcagaaatcaaactcaagtcatcagcttggtggcaagcactctccccattgagccacgtcgccatcccacctgtctttcttaatagacttaattatttattagtggtaaattagaacagttctgtaacgtttacatgcatttactatatgattaagcaaatggctaaacgtgtaggtaggtgctcagctcagctttgcctgcgaagtaaggagcatgcagtcatgaaggagtgtggcatcccttggaagtgtcggtataaaatcataaattaatgacatggtgtgtgtttatatgctgttgtgcatgtctatatgtgagcctgtctatatgtgaccctctgaacatgcaggtagtttttctaccctgtgtaccgaaagggcaaagaagcaaagatacaaagtattgacaagcacatgcctagggtccatatcattgctgctaatatctgtccccactgagggagatggtggctgcctccaaagctgggacgaggcaagcccggaggatctcctgtgagagaatgggaaggaaggattcagaaagccacagccacgggtgcctcttggcattcaactcccacctcacagctcagtaaccagaatctatctgtcctttggtctccatggtgggtgtgttctgagacccgagaggctcagttcccacacataaaacagtgtagcagtaacttaccacacttcacctttcaagtgtccttctgagaaccatacctactgcagagttcatgtcatgtaaacagtatcactgctgagtgaatcgtgaggagacaaagcctgcacatgttagggttggtgctatctgaaaacatcgtttttgatctgcgagtagttgaaactggattccagatccacagataatgaggagcaactataattaactgcagtagtggatcttacgatactgctgggtgtggtggtggtgagcctaactcctgtaataccagcacttaggaggtgtgaagcagaaaatcaggaatcccaagccaagtctacacagtgagattctgtccaataagcaaattctaattgatacagccataggaatcattagtagagaaatgacttaattggaaagtccagtcgctaaatgaccagtgagtgctagaatacaaaagtcattgtttttgcaaccattgagtaaggaccacggaagagtcattggtgtggggctggtgaggcagctcagtgggtgggtgagggggctggctgcctagcctgaaggaccttagcttagtccccaggactgcccggcgggagaaactcagctcccgtgctttgccctctgaccccaccaccatgctagcccgtgcttcacacgtgcatacatcatttctgcagaccaaacaaggaagtgaatgttataaaacagccgtcaatatatgccaaatatgaagagaagttttatgacagagcatttgcatattttaaaatatttctctaaaagctattttagttgcaaggcagagtaaaaataaatttatacagtggataaatctgcatagccagtaaattgtttgattgatcccccatcggggcatcaccagtgagaggcagacaaggagcatgtgctagggaattagaggcaggcagatctccaggagttgcaggccagccaggagacagtgggaccctgtctttaaataaataaatgaagtaaaaaaaaaaaataaaagaatcaacatctgtagaaatagatcaaataaaaaaggaggatattttaataaggcataagaggcatttaaggaagtgttctaagattattcttagaggaaaccaaacagatgggattaggtagacatcttaatatgatcaaaggaggggaaaatggaaatgacagcttaaggtgaacataggctcacagctcacatgggtgctttcctatgcctgtaaacacagggtacatttagaatatacacctatcaatacattcaaaatggaggagtgtttgttttgctaaattttatggggactttgacccccaaagtaggaaaaacccacatcgtagaatttcctctttaagacattacaagggactgggtgtggtggagcacgcctttaatcccagtactcaggaggtggaagcagaggcaggcggatctctgagtttgagggcagcctggtctacaaagtgagtccaagatatctatggttatagaaaggaaaccctgtcataaccaccccctcaaaaaaaaaaaaaaagattaggagtaacataagggtactggggctgcacttcctgaaatcaccccagatgccagagtagtggactcagtgtagaatttcagatggtggaagaagccggggtcatcatgacagataagccgaggactcacatcctgaccctcaagcagcagcagacgccatgccaacatcgatgcaggtggcatgttgatacagtcttcttgggacatgtcccactagaaatggacatgaggtgttcccctccccctggacagctcaggggtagccttcatgtccatccctgtcactctgtttacctggaagcttgtactgccacttcccctgacctggtgtgttattgcttttatgttgctgtgttgaaaccataaccaaggcaacgagagaacagagttcacgtgagcttacggttccagagagacgagcccagcactgcaggaaggccagcgcggcggcacgagcatggtgcttagagcagaagcaggtggctcacaacttgaacggcaagcacaaaacatagagaccgtgaactagaagtggtctaagcctttaaactcccaaagctcacctctactgacacttccttccagggctaagagagacagaaaataattgcatatacaggcaacctttggtccttaaagggttggctgaatattgtataccaatttcaagcagatagtaattctttctgtaggatttgtgacttaaaatgtgataccaagattacttggaaaggttaataagaatagttaaaagttataatggacggacaagtaaagaaaaaattctgacattagggctagtaaatattacaagtaaatcaatcagatttgctgtagagaaaacagcaaagtacatgaaactcatactgtattgcacatgagagctgatgttaggtgttggcatcaggtcagcagcattcgctactggtcctgcatgtcacaccacatgtcacaccacacgtgggaatgagttactgggtgtccgtaacaaggcaaacaattcaaaaggctctgtgaaaacacattcgatccaaaaggtcgtttgcctcaataaaagtcataaaaattcagctaaacttctctaggttaaaacatatgtcactatctatcatctgtctgtctatacacacacacacacacacacacacacacacacacacacacatacacataaaatgaataacattgaaggacaaaggagtaagaggaaaatacaagataagtcatttctatctggccctaaatatagaactcataaaaaaataaaataaaaataaaaaccctacaaccgcagcagaatagacaggtgagcagtaaagacggggagtccacaggagacacacaaatggccactaagctatgagtgcatggccagccccacatgcaaattataatgattgtattatttttcagctgcaagcattttgctcactgatgagggtcagatgaacgaagcacccgcacagtgctgttgtgggtgtaaatcgacacaagaattctggaattcatgcaattctagggttttcgatctagccctttaacttccaggaatctcttatagatacccgtaacaattggtccagtgacatttgtcatgactgcaataaaagaaaatagttgtcagcagtgcactttgggagagcacttggataacaggacagttgggcagaggtttaaaagtttgctcagcacaggatccccaatgaaggagctagagaaaggacccaaggagctgaaggggtttacagctccataggaggaacaacaatatgaactaaccagtaccctcagagctcctagggactaaaccaccaaccagagagcacacatggtgggactcatggctctagctgcatatgtagcagaggatggcctagctggtcatcaacgggaggagaggcccttggtcctgtgaaggttctatgccccagtgtgggggaatgccagggccaggaagtgggagtgggtcggtaggtgagcagggggaggggataaggggaggagatttccagagggagaccaggaaaggggatgacatttgaaatgtaaataaagaaaataactaataaaaaattgattccaaaaaaaaaattaaaaaaaaaaaagtttgcctgagcaagtgactaaagtgactgggtttactgatggcaaagccagcagtgtgtgcacgctaacaagcaggtttttctgtcaccgaaacattgttaatattttccacatctttatattttcatacactgccttaattttctaagatgaaaagtcactatctttattatcaggataaagggttttttttttcctttaaaattgttttctagccctatgtctctgtagaaacggcacatggtgtttcctcggacagtcaccgtagcgcagtgccacaggcatggagtggtctgcagccacaccacgtgcctctttgctgggtgcttgttccccctggggaggttttgagggctttcctcctccccatttttaattatttcccgtgggaagggtcacgtggcattgggagaacagctttgcaggactggctctcccaccttcaccaggagaggatccaggcctctgcccgctctcctaggtggggtgttgcctagactcctggcgttctaagctgggagatgttttcaggtattatttgtagtagttattttggtaagcttttatttctcacaggccccctccctcaattttctaccctgggttttgttcctccatgtttattgatcatcccttccatctctctgaagttttctgaacaatttagccctggcataaatgcaggagagtttaaaggcacaggatgccccagtaaactctaggttttactgcattctatttttagagcacagatatacttttaaccatagccaagtgggacattaaatactcagtgaaatgaaagttttatactttattatttttgagagactttgttatttcctgaacagactggctgacacaagggtaacatagttaccggcgtgttttgtcagagtagcgcggcctaactctgccccaggcacctctcagccagataataactgactgccatgggctgtgtccccgcaggagtccacctttattacgttggagggagagggtgtatgcggaatgcctcagtgacagcagcatcttcgtgcagagccggaactgcaactaccaccacggctttcaccccaccaccgtctgcaagatccccagcgggtgcagcttgaaaatcttcaacaaccaagagtttgctcagctactggcgcagtctgtgaaccacgggttcgagaccgtgtatgaactcaccaaaatgtgcactattcggatgagcttcgtgaaggtgagcagtgcccacccgtctcattcgggctgaatgcccccctcccccaacacacacacatacttcccccatacacatatgctcacacaacacacacatgccttctcacaacatgtaaatctgtgccttcttggtgtatatatacctatcagcaggctactgttgttgttgttgttgttgttgttgttttccaaatttctaacaagagtatcactgtccaaaaagttattctggaacatagcaatgtaatctttccctcccaccgtgtggatcccaaggatagactgaggcttggtaatgctgaggcttggtggtaggtacctttacccacctgagccatcttgcgggccctggtcaatcttctgtacttttgagagagggtctaacgtagcccaggtagctgggctgatgctgaggaggagtttaaagtcctgatctgtcagctctgcacctggagtggctaggtaggattctaggctgtgtgctaccattgccctgccgtaaggtctgtgctctacgaggccagcgctccacccactgtgctgtgtccccagccccatagctgctatagtgtctttaacaggtagcttaaatctgtggtcatgctatgagacagctgaataaatgtctttgttcctctcgttctttgctttcagcacggtatgcacaggagacttggtgcctagtgactgtagttctgtagtcagttatgatcttttagggcctgtgctcttttaggtgccttctggcaggcagtttgattcctgggacccacgtggtagaaacagctccctcagctgttctctgtcctccccatgtgcacacacagggcggggggtggggggagtaaatagatgtagcaatttacgctggaaattattttcagttggtcaggtttctttgttttgttcttacatatttctagtaaatcatgcattttatgtgtaattgaaaagttagcaaggccctggccctcagctccaaaagtatctgtaatatcaaagaaaggagaagatcggcgtcattgctcttaacagatatctctgtccacttctgccattgagaatgaaagtttttgaagatgccgatgaaatgttaaaaaccaatgtgcatctgatggcagcacactctagcaactggctcgtctctgaagtctccaagataagtctttatcccacttcaccgtgaggaagagtgctaattacagacttggaccaggcagtcgtctttcctgtgccgtcttcagaagctccgtggcttgttgcagggcctgtttagtggtttgttcatcactgggcgattccagagccttgctttgctcggcctcccccagatcaaaggcatcctgccccctccttagctgaatgtggcacctccttaatattaaaaactagtgccccttaaagaaactggcctgtatactatgtgcaaatgtgaccaaggagccagtccttgttcactgttcacaagtgccacttaatttttgacttagcattttggttcaggtgatttaccacctacttcacaacgtggatttcgtttgggggagaggactctcgagagtgggggtgtttgaactgtggtcgaggcacaggggctgttctcagatctccttctcatggtctgtaaaatgggactggctctcactggggctttggtaattatgcctgaagtccctgatggactgtgattattgaattcttgaagaagttttggctccagtaagctgtctccttggcatttgtttcctactgattacacaactaacagttaaatgttacttttgtacatttaaaaaattttgcactaaggtatttaaagttttttgttttgttttgtttttacttttattagtgcatgtatgtgtgagcgcaatgtgtgtgtgctgctggaggtcagaggagggggtcagatctcttggagcagaagtgagatgtagattgttgtgagcagtcgtggatgcctggaaccaaactcaggtcctctcttaacggttaagacctctcttcagcccaaagctgcagattcaaaatttattgacttttttctttctgcaaatactttatcattattctaaaaagaaaatacaaagaggggaaaagacacatctgaagcctctgcctccaggatgcatgcggcttcctgtggctttattagggacgggacatgaaaggatgtaatgcttacaagaatggcatctgtgcaagatagcgtggatgtggctgggagtgtgggatggacagatcctatctactaaaaagctggcaatgggctagagatggcttttacagaaggtcagaatcctgttctcatcggccacatcccacagctcataattgcttgtatcggagacctggatgcctcagataggcgttcgtagataaatccacactcaaacggtgtcctgcaacagcaatgcgactcacagggactgagcaggagttgctaggcttgcgtagtaagtaagcgcctttgtccaagaattcacctctagcagtgttttcttcttgaaatgggtgttggggtgcaggtccttgcgattgcatggcaagccctctgcaggctgaaccatctccttaacccatatgtgtgtgtgtgtgtgtgtgtgtgtgtgtgtgtgtgtgtgtatgtgtgtgtgtgtgtgtgtttcagacagggttttactctgtaacccagctggcctgaaactcactattctgtcccagctggctacaaacttatgccaatcctcaggccttacctcccatgtgctggaattacaagtgtgggccaccatgcctggttcccctctgtccatctttgtggcagagggaataaaacccagggtctctcatatgctaagcagtacatgccaccactgagccctgttagagcagtcgcttgctacattctccccttaccactgaatacagacagtagaggtcgtgtcagacagactaatattctgtttcttccccactctggaagattaaattcttctacctgtcaaccacacagatctcttgatctttcagtctcaagtgaaagtggagggaggatagttatgtaccccaaagttcttcccaacacctagtcattgtcttgaagtgtcaggctccatcattcatctggtcaggaaggtggcttgctacatggtatcagaatgatcaattaggacaatagtattcagtagaggtcaccatgaaagccaggagtgaacggctgtcctataatcctagcactagtgagaggctgcggtaggaggattgcaaatgacttcaaagtcagtctgggctacactgagtttgaagctaacatgggtgactcaatgagaccctatcttaaaaattttaaaaagtaaaatggtgttggtgtgaacaagagcacaaacttgtgattgacccttgtttgcaaagagttatggctgctagggtctggtacatacctctttctagcaattttaagaaatatatctgagcaagaacttttaagacaaagttgggtgtgtgcactccacctgtgttgtgtgtgtccctgggtttgaacattcagcagctacagttatatgcaggtctgtctctttagacaatgagttccttgaagacaaagggctggctgacatcctgctgggactaaagaagtgtgccacccaccatacctgacaaaatgggtcatctggggggtcctaggatggacttgagtattcaatatatatcccaacatttaccgactacatatgtatgcatttgtggtgtgctgttcttgtcagatgttaccatgagtccaagcaggcttctacaaaccgatcatctgacctttgtaccgaatcactgagactaaggagctaactgatccccagtgtgctttcttttgcctagggttggggagccgaataccaccggcaggatgttaccagcaccccctgctggattgagatccatctgcatggccctctccagtggctggataaggttctgacccagatgggctcaccccacaatcctatttcatccgtgtcttaaaagacctgtggcttccgtctcttgcaaactatcgagccttgcatgtacttgaaggatggacaagtcagacaggatggagacctgacgaaggagccacgataatacttgacctctgtgaccaactattggattgagaaactgacaagccttggttgatagcaagaaccctttcagtttacattgtgacattctgttgtaaaaatcaactaaaatgctgactttcagcaggacttttgtgtatagttaaaaaaaaaagagatggccaagccagggacaaattatctattaggaaaaaagaaaaaaatgattgtaatcaatccttttgtgtggggtgttggcagaaggttggcgctgatagtctttctgaagtgggctttcatcaggctcagagcccacgttgaatcatcttctcatgggttttcttaatattttaaaactacttgtttagaaatgaatgggttttttgtttgtttttaaagtacaggttaatcgttatgacatgcatagtaatctttctgaaactgtatgctggctgtattactgtcagaatgatggcaggcatatgctctttgctaaatatgtatatacagaatatttggaggttatgaatagtctaaatggctagtgggtttacagagtatctgaggggcggggtcgggaagaaaacgacggctgcaaatgtagactataccgtaaagctcagcttgctgccttaaacagacaagctggtgtctgaatttgctgtgtttcagtttttgtagagttttatctgacttcttttcttctgtcttatccgctccacggcacagttaagcagctggttaattcctctaactgtgagagcagatgagtaattccttctgttcgcaaatcaactggcttcgtgtttcagtacccagtatatgaaaagcttgaattgaatgagcagtttttatggagtttacagtacagacataggctttgatttccaaataaattgtttgccaaacctggtaactctgttcattattcgcaggattaaagatctctctattggaatccatttcaaaggttgttttttttgtttttgtttttgttttttgttttattttgatttgtttttttttgtactatttggtttcttttcttctgttaatttttttattctcctttgctcttatacagcgagtacttttattccaacactagcagggtttttctctactggaaatttttaaataaaacctgtcattattgcttactttgattaaaaaatgtgtcattttttttctttgcatgttaaaattttagatcagtaagatatggtgctcttctgagtgctctctgcctgatacaaaagctaaattactgaaatgaagacgtgaacctgaactgctaagagagctgagtgatttggaattggaagagtaagggtacataaaactggaaacattaagggaaaaactaagtgtgtaaacttaaaaccagtttcttgaaggcaggtgggatatgtaccatggtgtgcctgtgcaggtcagagggtagcttggtctgtcctcccatggtgtgggtttccgagattaaagtgaggtctccaggattgacaggcaacaccgttacccactgaggcatcttaccagcccaccgatagataatgtcaggaactgcagcagcacgcttaggtaaccagaagagaagatttgggagttaacagtgcacacaagggcagccatgggagaatgcagccaagatggctagaaactgaggctgcacaagagaaaatggtgaccttggtgcagttttcctgggatagggctggtcattcctcttatccctgactgcactggaactcgctctgtggaccaggctgatcggagatttgcctgcctctgcctcccaagtgcatgtgccaaccactgctcagctccaccaaggggatttttaaaaatttattaaaaacaaaaaacaatttgaggtcaaagtttctagccacataaatgtcactgtttctccttatattctttcctagacttggttcacaaccccaaaatttcagaatctactgcctcccaccattgggagaatgtcttattcccctgaaactacaaaatgcaaccctaaacagtggccaggcccagatttctttctcttactgttgcccccaagactatctatcactagcaagcagagaaagcctgggccaggagacctagactgtgacagtcctgtccatctttgctagacctctccatttatattccatttatcaccacagagttagactgggaatcattcagctaaggtaagaatgccttagaaatgtgtcaaaatacaagcaccacctttcttgaatcttttgccgtctgtacctttcatcagcctatgaggcagcctgcctgtcattccagcctgagaagacagagatggggagtccccagagcaaattggctgtggagactagccatatctgtgaactctagaattgattgagagaccgtgcctcaaaagaataaggtggaagaaggatggagggttattcctgaagtcaaccttggactccacctgcatgtgcacacactcacatgcaaatttgtgcatcaaaaccaaaccatgacaatggccaatgggaatgagtagagttaccattaaattataccgtggtgtataactggaagttgtctaaaaataaagagttcagataaaatttactgttaagttatatcatactgtgacatataactggaaattgtctgaaaatagagctcagggcaagagttctcaaaagcaggtggatagctgcctttgccttccttgagttcccttgttggcggctggacagttagtgagttggatattaggtgagttgagtattacactgttagtgccttgaaggtgtgctggataaaacaggaagagcatccggtctgtccctgggtgcgtgtgtacctgtggtgcataaaaaatgcccagtgtggataagggcaatttcatggaattctagtaaaatctttttttttaattttttattaggtatttagctcatttacatttccaatgctataccaaaagtcctttttacccacccacccccactcccctacccacccactcccccttttggccctggcgttcccctgtactggggcatataaattttgcgtgtccaatgggcctctctttccagtgatggccgactaggccatcttttgatacatatgcagctagagtcaagagctccggggtactggttagttcataatgttgttccacctatagggttgcagatccctttagctccttgggtactttctctagctcctctagtaaaatcttaatgaaaaacgttctcactggccatagaagattaatgagtatgtctttgggaaatattttgtgaaaaggaatgagaaaaatcaaagcaactgtttgtctaaataatgagaaagccaatgaagttcagtaagatggcaaaggtgatgtggactgtttgctgagaatcagtagccgggatgattagaagtggagagccctgcaccaccacccctctgtcatttgacagagcttgaactaggaaatgtcttaagttccttgcacatggtacctcgtctgtaaaacggagacaggaaagctaggctcattgggtcatcatgagaatgagcctgcacaaagcccttagaactcctcagtaaattactaagtctccttaagcccggctgggaaaggcttgcattcagctggtgtttgggggaagactcctgcctttaagagaatgaagagaaagcctgcttccagtctaaagggaggaggctagtttatgaatgcctgggtctttgtgctctggtccccataccaggggctttcccacagcatttctctcttcctcacaagaacataccactcagttcccaactcttgtcttattatcttttgctgaaataaatgattaagatgatagctggtgtataaagagaatcagtttgtttttgactcagtggtccatgactttgaccaggaaggtccattgctttcaaacctctgtaagggacagagatgagctgctgtcatcacaggagcatgggacagaaatgaactactcaccttttgactgagcaacagggcgatgtgggattggtgtctcccacttggccccttggaaagcatgcctgcagacatcctagacctacctctttaaaaagacttcaccatctcctgatagcacatttctgcaagccaagcctttaacacaatagaccactaagtggctgttctgaaatgctgtcccctgagcatagcagtcattaccaccttaagcagaacagtcacagctacctgcaagaatccctcaaagtgtgatgttaagttcccataggaagtgaagagttctcagaccgctcctgagattctagccactccctgcccctccctcccagctgtaggtaagtttgcccaagctccacgttgtcctggttgctgcttgagtaggtgtagagtgtggaaggctaagtgaagaagagagaccccatctaggcagccatagggaggccatgtacactggggtgaagcttcagtgatgtggttatttttctggtaacctgtgctcatccaagtattctcttaccatggccctgtaaataagcacagtgaactggctgcctcaccagactaaatgtgagtagcctcattgcttctgtctagtgttgagtctctatctgaaataaggagacgtatgtgcccattacctccccaggaaaggttcacaccacagtgatatttaagatgagaacaattcatcattttaaaaaacataaataaaccactccagaagctagctatcttgtccaaagtttcctagtataaacataaacttactacaaaatgagagagaaaagaagaagaggaggaggaggaggaagaggagaaggtgaggaagtagaagtagaaaaaggaaaagaaattgtgttgactttgttgaagagagatggatgggtaggagctctacagaggaggtgacatttaagtttgaaccttgaaagctggaaaacatttagataattgtaacgtttctaggtgtcaccctagaaaggtcagatcatagttacctgtgagtgatgccgactatttgttttgacctctgagctgacactccagtctgcataggtgatgactctgagctgtctgtgtgctctgtagagattatccctgcaaaagactactgagggaatgcatgcacacaaggcagacaacagaaagtgcgagtgggaggtccacatgcatttggaagcatcaaagtgtaggccagttagacaggagccacaccattaataatcttgggtacagtatactaaggaatgggattttttttcctcctatgattatagccccttgatttatgagatcacttgaggatcaaacacacatgcaagatgcaactctagtgaaggatacagaaaggaatagagaagaaacagagcaggcttccatagcaaggtttccttttcagaagggtcaacacaggacagagaagggtgtggcctcagaataggcttatacttaggaattacgaagctgtagctaaccgatgagtttggggagtacttagcttcgtttcctgttgtgataagacgcactgacaaaataatgggagaaagcagtcctaagaatccttcaaggtgaggaaggcaaggcaggagcttgtagcagctggtcacactgcatccacaataaagaacagagtggtgtgtgcaatgtgtgtgcgtttatccagtctaggagtcctgtcagggaatgaagccacccacagtgggtatgtcttcccatctcaatgaatacaatcaaatgtgatggtttgaataggaatggtccccatagacttatatgtttgaatgcatgggccacaaggaatggcgctattaggaggtgtggccttgctagagtaggtatggacagttttgtaggaggaaatgtgtcactgagggctttgaagtctcagatgctcaagccatgttcagtgtggaattcacttcctgctgcctgccttccagatgtagaactcttagctcctccagcaccatgtctgcctgcatgctgccatgcttcctgtcatgacaataatggactgaacctctgaaactgtaagccagctacaatgaaatgttttcctttataagagttgccttggtcatggtgcctcttcacaacaatgaaaccattcccatctcccaggcaattctaggttttgtgacattgacaattaacttagaatggggacagggcagctgtggtacataaagccaacatgtgacatgtgggactgtgataagcagcctattttggttgaatgaggctttctctggtgacccagtagaaaactctacaagggacagaaaagagagccacgttcccagagtcaggtgcctgacaccacagagcctccaactccatgattctgtgactatcagtcacacagacaatgccccaagcttctggcattctggctagattccacccccagagttatctgactatagccaggtatgctcctccccacagttacctgatagcccagccaactataaaaggagctgtttggcccctccttgctctctttaagctctcacctttcttactcttctctctagccttccttctctctctcccttgccccctctctccacatgtccatggcctgcctctctctttctaccttctctctctctacctttctacaataaagctctaaaatcatagactgtctctgctcatcaaggcccgtcatgcttgaacggtgggttaggctttcctctaaggcgcctcatctagcctcctgctggaaggccttcctgtgttcccgccacagaccagaccaaggactctcactcatgtgagaaccatccagcactcccctctcctgccctctcctccctttgccccagggctgactgagctgccattctgttctcagctcttaagtggtatccagcgtgggatgacggaggctgagaacctggtacctagtgctgccccttgtctacctcccgccgagctggggttccctggcttcccacagccagacacccacccagggccgcatggaaagtgtgtaaccaccttctgtgtccgcccgcccagagcacccgaactctggcgggacacaggttttctcccactctccctttattccctcacgctccaagccctgcagtaacaatttgaaagtctgagctgaaagaagtagaggtatttttgagttctaaaaaaaatgtttattggtgaggaggaggtaacgatggagaagagcatatggtggctggaagatgaggacataggaaggctgtgttaggacaagagtcgcgagctcagctgtgagatctgtctccctggagagtcatccacagaaaagagacgaaggcggctgagactgaagagcactgctgtgaaagaggaaggagaccacgagttaacaaagcacgcatccccaggaaggcatgagcgtagctgaggtgggcactgagcctgctgtccctcctgtacccacagctgaggtggcactgagcctgctgtccctcccattcccacagctggcactgggggctcagggaacaagagtgtggtcaagttcctagagttggggaaattctgtcaaacaatgaccaccgtagggatgatgcctgtatggctatatagcttgctttcgtcctgccgtgaccacacctatcttattcacttgtctcactgctgtggccatacccaacaaaaggggcttaagaaaagagcatggtgggaaggcatggtggcagaatgtgaggcggctggtcacactgcacctgcagtcaggaagcagagagagatgacccctgctgctcagctcactctctccctttcaaaaattaagcattaacaactccccaaaataatggttttgagacaatgagttaagtatcccagatgggccagaaactgtgtcactaaggatgaccttgaacttctaaccctcctgcctccagttctgagtgctaggattacaaatgtgtgtcaccatgtcctatttatatagcattgaggagaaagttctggcctcatgaacattagggagaatttctgaattgaccttgagcggttctatgttgaacagacacttcactagaccctatccgcccagatctcactatcagcttcaggatcaacccaccaagccacccaggctccagtcatcctcttatccctctgaatttgtggtctgcagcctgagtgtgtcaccttcacagtcccttaagccattcactttccatacagtcttacgacccaaattctcgttctcattttgtaggcaaggacttattttgcttgtgtaattttatctcctatgagatcaggacatggaagtcttctattgtacttctggaagtgtatggtccgtaactaggtgacctggcagccgccttgacctgggtgactgcctaaatacacagcacattctactgacaccagtcatcatatattaataacacacgtgtatctagtaggatccattaacttgtccctaccactgttcttacctcatccggcgcttggctcttgtctaaatatagttagaaacttaagtcagcttgggtcctgctttctcccgggagggagacgaggtaagtgaatttaacatttataggctctgtaattctgctttagcataagcattaagtgtaacatcactcagacatttctttaaagttaatccccatatgacaggaaagtactttaaggctcaaaccagcatgactccagtatcaatgaattgtggcactaatttatctttaaagtgggggaagggctctacatatattccagattccagcgcccatctcctaggattttctaaggagaatcaaaggggaaaaggctttgaggactgagacctgcatccagaccctgcctcctgtgcttcctcctaagtagtttctggaaagttcttcagatctattgaagctttatgttctgtatgaaaagggtggggggaatgaatgttgtgaagattagaaatattaaatcttgctggccatatctattacctgctcaatagctattaaatagtagtcatggtattatgtttggttatgctggtatggtaataaatctctttccccaaccccatctctgtgtgtttgaaaatttacagtaatcactttcaagttgtttgtacagcatggaagttatacctgaataatcttgtaaattttctttgacttagaagacagaatccatcgaattccattagaaaatatacgtgacttttaaactgagaaaccttagtcctgtgctgtagacgatcaataaatattgatcactgaccctgagctgccacttttcatgagaacatgagcccaagaccccccttctacagaagtctgcccttaatgcaaacattaactactgcttttatagcatactattattatgatatccatactctgcatcgggaaatgatttgaaatatataaagaagtatatccccaagctttgataaatgagtataattagttccaaaattcctacccataagccaaagctagtgtcatcaatcattaaatattcccattaaaattaatgtatgaaatgtcagtgttgctcttaatggaataattaatagaggagtgctttgcttaatagtcttgaggtccccacggctctgtcctgactgccctcctcaactctgtctaccttccctcccaaagttactgcacccttcaatcaacccagagctcccagtgcctcccatatactgttgctcactggatgagtctgcagccaggatgcctctcaagaacttgtcatctaacttgacgtttctctcccacatatgtcatctcaaacttcacatgggcacagctggactcctgggcatcactctttcacacagtgtgagcttctctttcttagtcactattgaccactgactgtcaataatgcagttgttaaagcaactcattccaccccaaaccaccagtaagtccaactgcatccacccttaacccaccctcagtgcatccgttccttttcagatctacgtctgccaccatagtggaggtggcggtatcccttgcctaaactacagcttcttatgttgagggtcacaactgtagaagtggttgcacaactgagtgaggggggttgcaaaaaatggcatcagtaaagggtttg

SEQ ID NO: 2123 - DNA, 1613 bp, Mus musculus
acctcaccctgtctgaggagcgtgtagaactagaccagccgctatgaatgtgaccagcttgttttcattcacaagtccagctgtgaagagactccttgggtggaaacagggcgatgaagaagagaaatgggcagagaaagctgtggacgctttggtgaagaaactgaagaagaagaaaggggccatggaagagctggagaaggccctgagctgccctggacagccgagtaactgcgtcaccattcctcgctccctggatggcaggttgcaggtgtcccaccggaagggactacctcatgtcatttattgccgtgtgtggcgctggcccgacctccagagccaccatgaactgaagcctctggaatgctgtgagttcccatttggttccaagcagaaggaggtctgcatcaacccctaccactataagcgagtggagagcccggttctcccgccggtgctggttccgaggcacagcgagtacaatcctcagcacagccttctggctcagttccgcaacctgggacaaaatgagcctcacatgccactgaacgccacgttcccagactctttccagcagcccaacagccacccgttcccccactcccccaacagcagctaccccaactctcctggcggcagcagcagcacctaccctcactccccaaccagctcagacccgggcagcccttttcagatgccagctgacacacccccacctgcttacctgcctcctgaagaccccatggcccaggatggctctcagcccatggacacgaacatgatggcgcctccactgcccgctgaaatcagcagaggagatgttcaggcagttgcttacgaggaaccaaaacactggtgctctattgtgtactatgagctcaacaaccgtgtgggtgaagcgttccacgcctcgtccaccagcgtgctggtggatggtttcacagatccgtccaacaataagaaccgcttctgccttggcttgctctccaacgttaaccggaattccactattgaaaacaccaggcgacatattgggaaaggagtccacctttattacgttggagggagagggtgtatgcggaatgcctcagtgacagcagcatcttcgtgcagagccggaactgcaactaccaccacggctttcaccccaccaccgtctgcaagatccccagcgggtgcagcttgaaaatcttcaacaaccaagagtttgctcagctactggcgcagtctgtgaaccacgggttcgagaccgtgtatgaactcaccaaaatgtgcactattcggatgagcttcgtgaagggttggggagccgaataccaccggcaggatgttaccagcaccccctgctggattgagatccatctgcatggccctctccagtggctggataaggttctgacccagatgggctcaccccacaatcctatttcatccgtgtcttaaaagacctgtggcttccgtctcttgcaaactatcgagccttgcatgtacttgaaggatggacaagtcagacaggatggagacctgacgaaggagccacgataatacttgacctctgtgaccaactattggattgagaaactgacaagccttggttgatagcaagaaccctt

SEQ ID NO: 2124 - protein, 387 aa, Mus musculus
GACRWAAMNVTSLFSFTSPAVKRLLGWKQGDEEEKWAEKAVDALVKKLKKKKGAMEELEKALSCPGQPSNCVTIPRSLDGRLQVSHRKGLPHVIYCRVWRWPDLQSHHELKPLECCEFPFGSKQKEVCINPYHYKRVESPVLPPVLVPRHSEYNPQHSLLAQFRNLGQNEPHMPLNATFPDSFQQPNSHPFPHSPNSSYPNSPGGSSSTYPHSPTSSDPGSPFQMPADTPPPAYLPPEDPMAQDGSQPMDTNMMAPPLPAEISRGDVQAVAYEEPKHWCSIVYYELNNRVGEAFHASSTSVLVDGFTDPSNNKNRFCLGLLSNVNRNSTIENTRRHIGKGVHLYYVGGRGCMRNASVTAASSCRAGTATTTTAFTPPPSARSPAGAA

SEQ ID NO: 2125 - DNA, 96422 bp, Homo sapiens
cccaatagcagtgtaaaagtgttccctttcaccacatccataccaacatctattatttttgatttttaaattatggccattcttgcaggagtaagatggtatctcactgtggttttaatttgcatctccctgataattagtgatgttgagcatttttttcatgtttgttggtcatttgtgtatcttcttttgagaattgtctgcttatatttatgtccttaacccactttttgatgggattattattattattattgtttgctgatttatttgagttccttgtagattctggatattagtcctttgtcggaggcatagtttgcaaatattttctcccactctgtgggttgtctgtttactctgcttttgttaggtgaatttaggagcaacatttgaacaacatatataaaatgatcgaattaatagagatcagataagtgaagagaatgctgtcagtctatatcaggaatccagtagcattaatattctctgtgatgttttggggaataaggacgttgaagtattgaagttccacgtggcaggaaagtgagtgagagaataaatcatcctcaaaggtctgtgtctaaatactacaaatacttactgacttcaccaatactacaaatacactgacaatatagcacaagacaataattccattaagcaaagagtatagaatggcccatgtattagtctgttctcacactgctgtaaagaacttcttgagactgggtaatttatgaagaaaagtggtttaattgactcgcagttctgcaagcttaacaggaagcatggctaagaggtctcaggaaacttataatcatggtaaaaggtgaagggaaagcaagccacatcttaccatggtagagcaggagagagaaagcctataggtgctacaattttaaaccatcacacctcgtgtgaactcactcattattatgagaacagcatgggggaaatctgcccccatgattcaatcacctcctacctggtctctcccctgacatgtggggattacaattcaacatgagatttgggtggggacacagagccaaacaatatcattctgcccctggcccctcccaaatctcatgtccttctcacattgcaaaatacaattatcccttctccatagtcccccaaagttttaacttgttccagcattaactcaaaagctcaagtccaaagtctcatctgagacaaggcaggtcccttctgcctataagcctgtaaagtaaaaaaaagttagttacttccaagatacaatggggatagagaaattgtataaatgctcccattccaaatgggagaaatgggccaaaacaaaggtgctacaggcccccatgcaagttcaaaacccagcagggcagtcattaaatcttaaagctccaaaataatctcctttgactccatgtctcacatccaggttacattgatgcaaggggtgggcttccaagtcctttggcagctcctgtggctctgcaactccaatgcccctgtggctctgcagtgtacagccccctttagctgcattcacaggctggcattgagtgcctgcagcttttccaggtgcacagtgcaagcagttggtgaatctaccattctggggtctggaagatgacaaccctcttctcacagctctactatgcaatgccccagtagggactccatttgagggctccaatcccacatttcccctctgtactgccctagtagaggctctccatgaggactccaccttggcagcacacttctgcctggacatccaggcatttccgtacattatctgaaatctaggcagaggctcccaaagctcagctcttgtcatctatgcgcctgcaggcccaacaccacgtggaagctgccaaagcctgggccttgcaccctccgaagcaacagcccaagctgtatcttggctcctttttgccatggctggagctggaggggctgggttgcagggcatcatgtcccaaagtggcacagagcagcagggccctgggcatggcccacaaaaccttttttccctcgtaggcctccaggcctggaatgggaggggctgctgcaaaggtatcttacatgccctggagacattttccccattgtcttggctgttaacatttggtttgtctttacttatgcaaatttctgcagccagcttgaatttgtccccagaaaatggctctttttttttttcaaccacatggtcaggctgcaaattttccaaacttttatgctctgtttcccttttaaacataagttccaatttcagaccatctctttgtgaacacatacgactgtacgctgtgaggagcagccagaccacatcttgagtgctttgctgcttagaaatttcttctgccagataccttaaatcatctctctcaagttcaaagttccatagatctctacagcaagggcacaatgctatcagtcttttagctaaagaatagcaagagtgacctttactgtagttcccaataactttctcatttctatctgagctcaactcagcctggacttcactacccatatcactattagcattttggtcaaaatcattcaacaagtctccgtgaagttccaaactttcccacatcttcctgtcttctgtgcgccaaattgttccaacctctgcccattagccagttccaaagttgcctccacattttcaggtatctatatagtaattccccactttcctggtaccaattttctgtattagtccattctcacactgctataaagaactacctgagactggataatttatgaagaaaacaggtttaactgactcagttctgcaggctaaacaggaagcaaggctaggaggcctcagaaaacttacaattatggtggaagttgaaggggaaaccaagcacgtcttattattgtggagcaggagagagagcgaggtgggggaagtgctatacttttaaactatcatatctcatgagaactgactcactatcaccagaacagcacgggggaaatctgcccccatgatccaatcacctcccaccaggtcactcccctgacacatggggattacagttcaacatgagatttgggtggggacagagagccaaaccaaatcaccccacaaatttaagaagctggaaatataagttctactgccatcataatgtttaccatagaattttcacatggaactttgtaatgtatagactgttacaaaactctcaggaaaagggctgacaactttttattaattcctacaatttataattagatctgaatttcagacttgggggcaataatgagaacaattactagctgtaattaagaaaaaataccaatttgtatttgaccgcaacagttgtattagagatttattctttcagcaaatatttgagggtctgccatgacaggtctgtgcaaactttgggcttggagatgggaacacaaactagatacagctcccacccacatattacttagaagagcagtggggttttctcactggatattcaataatttgactaaatacattcataattacagacagctataagttctttggagcaaagggtgtgatgagagaataaaggatttcaacaacaacaacatttttttctgagacagagtcttgctctttggcccaggctggagtacagtggcatcctcacagctcactgcagacttgaccttccaggctcaatccatcctcccaccttagcctcctgagtaactaggactacaggcacataccaccacacctggctaattttttgtattttttgtagagatggggtttcaccatgttgcccaggctggtctcgaactcctgacccccacctcggcctcccaaagtgctggaattacaggcatcagccaccatgcctggccagcgttccttttaatatgaaaaataacacaccaatgatccttggcaggctcattccaggaaaactgagtcacttaaattccctgagggagctgaactataaatcattacatttatttttctattgagtagaatcatctcttaaaacaggtttttggatttacattttgcctatataaaatttgcagccaattttaaggactcgtcttattataagtgattagtagctgattttttcctgataaactgattagcataattagtttgccttcagttccttaatatctccttttctggaaggatcttgtcctcctctctacctcagccatccgccatctctggtcacacccctacatcttggcattgctcaaaactgccccagcatcatgatttcaatttcaagtatctcattcccagactgctccccagcttttgggaaaggctcccaactccagtaactcatggaccacactaggagcttcactcggtggatcctatcatctttccaacatttcacattactatatgttctcgccttcctcctatcacagacccccgacagtcactctattgcctatagcttctgctgtctgatccccttcccttccctgacatacacctgcaaaaccccagccctagttaaactcagctctgtcccctcaggttaaccgaggctggagaaaaacccacagccatgctgactggtcttactttaaattcatggccactaggctgggtgtagtggctcatgcctgtaatcccagcactttgggaggctgaggcaggtggatcacctgaggtcaggagtttgagaccagcctggccaacatggtgataccccgtctctactgaaaatacaaaaattagccgggcatgctggtgcatgcctgtaatcccacttactagggaggctgaggcaggagaatcacttgaacctgggaggcagaggttgcagtgagctgagatcatgacagtgagccaagattgtgacaatgcactccagcctgggtgactgagcaagactccatctcaaaaaattaaaaaaaaaaattaattaattaatggccgctaacctcaaatggacacttaatagtagcaatcttaccacatttccacagttcattcactctcaaaccctaccagatgacttagatattactcctctctcttccaacctccagcatctcttcaatcccaccattctcgggaagcaggttcccgggcaatttcactaagatgagagagtggtgagaagagaccatccctgcgttctcacctctgcaagcaagcaccagcttgtgtgcatctgggtccacacactctgccttccctccagtcactagcttttcctacatcactgcactgtccccaaccctgccccccagcttttcagtggatgtgtaaagtagactcagcttctaggtctttacacttgctcttccttttgcttgggaggttgggaactcatccctcagagtgtgtactgtgcttccttcccttccttcaggacctcttgcagtgaggtttcctctgcccctttagaaatagtcatctctcccattctcaatccctcttcccctgttttttccatcacttgtaccactacctagcatatttgcgtatttatttatttatttatttatttttttttttgagatggagtctcgctctgtcgcccaggctggagtgcagcggcacgatctcggctcactgcaacctctgcctcccgggttcaagtgattctcctgcctcagcctcccaagtagcggggactacaggcacatgccaccatgcccggctaatttttttttttttttgtatttttagtagagatggagtttcaccatgctggccagactggttttgaactcctgacctcgtgatccatccacctcggtctcccaaagtgctgggattacaggtgtgagccaccacgtctggccgtgtatttatttattatctgtcttccttaatgagggcagggatttttttctgcttgccaccatatcccctgctagaacagtgcttcacttactcattcattcaacaggtatttaatatgctcctgttaaataccaggcactgctcaggtgctgagattatagcaatgaacacagaagaccaaaaatcctgctcttttggctaaataatacggagacatttgagtgaagacttgagggagatgaaggagtgagccatgtggacatctgtgggaagagctgtccagggagtgctatggtttgaatgcattccccaaagtttatatattgtaaacttaatccccagcgcaacagtgttgagaggtgagaacttcaagaggtgattatgtcatgaggactgttaaattaagtttaggctaaagctgcctccatatatatatatatacgtatatatacatatgtacatatgtatatacatatatatacacacacatatatatatatatatatatatttttttttttttttttttgagacggagttttgctcttgttgcccaggctggagtacaatggcatgatattggctcaccgcaacctccgcttgccgggttcaactgattctcctgcctcagtctcccgagtagctgggattacaggcgtgagctaccacgcccggcccatacatattttaagttaggcctaaaggtttctctgtacacagcaaactgtaacctaactggatatgcaaacagactgtagccaactcttgtaccaatcacagagttttggtcaatcacaggcagccaactgttcaaactgtgttaaaataaagcaaatatttagctctaaccaatccagttttttctgtacctcactccattttctgtcacttttctttctctgcccataaacatcatctgaccctgtggcagccccagagttgctctgaaactattctggttctgggggctgctcagttctcaaattgctctttgctcaattaaactctgttaaatttaatttgcctaaagtttttcttttaacagggatctgtcctcatgaatggattaatggcattatgggagtgcggtttggtatctcaggaggggattgctgatataagcatgagtttggcccttttctacccttcctctcatgttctctctcttgctatgtgatgccttctgctatgttgtgatgaaggaagaaggccctcaccagatgcagccccttgattttggatttctcagcccccagaaccatgagctaaattaacttttattgtgtataaactgcccagctggtggttgtattggtccattttcatactgctatgaagaaatacccaagactgggtaatttataaagaaaacgtggtttagggctgggtacggtggctcacgcctgtaatcccagcactttgagaggccaaggcaggtggatcacctgagctcaggagtttgagaccagcctggctaacaccacaaaaccccgtctctactaaaaaatacaaaaaaagattagccaggcgtggtggtgcatgcctgtagtcctagctacttgggaggccaaggcaggagaattgcttgaaccctggaggcagaggttgcagtgagctgaggttgcatcactgcattccagcctgggtgacagagtgagattctgtctcaaaaaaaaaaggtttaatggactcacagttttacacggctggggaagcctcacaatcatggcagaaggtgaaggaggagcaaaggcacatcttacgtggcagcaggcaagagggcgtgtgcagggaaactgccctttataaaaccgtcagattctcatgagacttattcacaatcacgagaacagcatgggaagaacccacccccatgattcgattacctcccaccaggtcccttctatgacacatggaggttatgggagctacaattcaagatgagatttgggtggggatacatagccaaactctatcagtggtattctattacagcaacacaaaatgaactcagaaagggagggaacagctagcacatagatactgaggtgagaatgtgcccagattgttccagaagagtgaggatgccagtgtgacttggggaagtgagcaagaggaagagtagaagtgcaggtcagagtgctaaaggaggggaaggaaagattatgtagagtcttgtgcttattatgggaacttttattctgagtgaaatgaggacccaagggaggattttttaaaaatttaataaaatgatattaatatacagtccatatttaggtttttataatggtctcatcaatgtccttttaaaaagaatatccaaatttttattatcatttaaggaaataatttgcacaatgggcaaaatcaaattttattgcatacataataatattaatagttatcatttaagactactaggactgcactaagaaaggccatctaggctgggcgcggtgggtcatgcctgtaatcccagaactttgagaggctgagacgggtggatcacttgaggccaggagtttgagaccagcctggccaaaatggtgaaaccccgtctctacttagatgggcgtggtggtgtgtatctgtagtcccagctactcgagaggttgaggcaagagaattgcttgaacccgggaggcagaggttgcagtaagccgagatcgtgccattgcactccagcctgggcgaccgagcgagactccgtctcaaaattaaataaatgccatttttgatttttttaaaaattaacgactttaaaatgacagtttatagctcctcctccccattcaggatccaatcaaggtcatatactgcatttcattgtcatgctttttttttaatagcttgaggtaaaattcacataccaaatgattgacccatttaaagtgtgcaatttaatggcttttggtatatgcacagagttgtgcaaccatcaccagaaactagttttagaacaattttgtcaccccataacctttagctgtcactccccaggttcctcatttccccaaccctatgcaaaccaccaatctactttctgtctccatagccttgcctactctgagcatttcacatatgtggaagaatacaatgtgtggtctgtcttctttcccttcacgttttgaaaggttatccatgtagcatgcatcagtatcagtacttcattcctttttatggctgaataatgttctcttgtatgggatactttatactatttatcaagggagggttttcaacagaggagtggcctgatccgagtggcatttaacaaggttcactttcctgttgttctaaggagcagagaatgatcaactgcgtcaaacgctgcttttagggaaaataagatgaggcccacgaattgaccagtaagtgctcaaataggttaagggaaaaaggaatttaattagaagacatattctgatatacattgctgggagtgatttttttttttttttttttgcttcatgtgaaatttattcctcaaaaaaaaatcattttttctaaacgtaactcaacattatagtaattatgcaagattttatgcagcttcaagagttagccaagagaaaagttgactcttgcaagaagatattttcaatgtctatgcagatcaggtaggtaagagttaagtgcgggggagttggcatcatctaaaagactgtagaaattggaccaaaaatgtggagttctaaagcagtatctccttatggcatgccattatttggagcaacaaggttacctactcgaatcactggatcctgagttgacacaaaacgcatctgttgactcagggtttgtataaccacgtgcagtatttactaggctatccaattctgggtacgtacaacttctggggcctgcaaattattggagagtgagtgaggggcaacgaaagatagacataaaagggcgcgtctcgaaaggtaactgtcaacatgcactccacgtttatagaacgattcagtgggcgcggtggaagcgttaatgaacatttcagaaaataaacatatggaacatcgaaattcacttgcagataatggactaagtccgctccaccgggactaaaaaggcagggttaggaaagcctgaacgccgccacactgttttttctccaggaagaaacggggcgtggggctgccggtagaagggggtggctccggccgctcccccgcgccgtcctccggccccggccgcgctgcgctcacgccggccgggccgggaatttggagaggatccctggtcgcgcggcagcggcggcggcgcgcgggtgagcgggtgagcgtgtgagcgggcgggcgggcaggcgagtgcgccgggtattggcagctgaggagtggaggctgggcagctccgactccctgacgccagcgcgaccagatcaatccaggctccaggagaaagcaggcgggcgggcggagaaaggagaggccgagcggctcaacccgggccgaggctcggggagcggagagtggcgcagcgcccggccgtccggacccgggccgcgagaccccgctcgcccggccactcgtgctcccacacggacgggcgcgccgccaacccggtaaaacgaaacagacccgaaccgaactttcccttcatgccgcgtcccagccctcccctcggcgccccgggctttccagcgccgccgccgccgtctctgcacgcgtggggccgccgcggtcgtgctgggctgggggcgcgggcagcggcgggaagggggctctttctgcgcggggcgggccgcgaccccccccccccatgatggcgcctcccgtctgctcggaggagcgaacctgctaccacgtcttctcgcgcccagcccgccgggctcccctggtgtctttgttgggtcttctgctgtgggaagcccagttcccgggcccccgagcctcggctcccgggcctgaccgcgctgggatctccccggccgcgctccccttccgcgcgctcctcacatctctcccgtgctgccgccgggccgaggcccgttcgcgtggcccgcggacccattgtgtcccccgcgccggcggggcgacccctgcgggagctggaggacgaccgctggcgctgctctccaaggcgcctggtggagcgggtctcgcgggcgggggaccccggcgccccgggcccctccacatcccgcacgggttttcttctcggccccagcaagcctctttggggtcgaggtcaaggaaagttcgcaccgagatcccctctaatttattcaaaggtttggcggcggcgcgtaattttttccccctcttccgcctacacccgctgcgtctcctggtgtctcgttcctttccctttaccggagtcgattgcctcactgcatgtgtattcgtgagttcgcggttgaacaactgttcctttactctgctccctgtctttgttagtgtttctcggggttgtttctgtaggaaggtgggggtggtgggcgtgagagacagatgtgggcttgtttttctagttgctgaaactgtatgaaggctttaaagggagaacgttttcttgatgtgctttaggaggggaggaggaacaaatgcctgccagatctcacagctacagtagctgagcttttgtttattttgaagagcatgcaatttttaaatacacggtgcaagataaccagtaaaggcgcgttccttctgaaaattgaggccggtctcagaaccatctcctgagaaagcatccttttcgtgagtgctgagacaactgtcctttttctctgccctcccccctcttttctttccattgtatctgaagtttcaaagtacgtggaatgatacagaagttgcatgatttctgttatttcttcctgttgctgaaactctcagccgctaaatctcagaatgcctctatttcagaacatctctgggtctaattgcctgttgtggataacttgcccacacctcagtaacacaatgagaaaactgttccctgcccatgttgatttttcaaattgtttgtaattactttaaattgtattgaaggtaggtggaccgtgttaaaaaagaatcggaacagaagtgttcactgccccagcattttcaattggtataaatattgttgcatcagtgttattctgatgtaggtgccagatctaaatatgctgtactgattaaagtgtttgttctgccctctcccactctctttcccatttgcaattatttgctatttctgtgcaggtggtgtatcattggtgtaatactgcagttcttaggaaggtgtagctagggtcgtgagagatgatttttctggaggtgggtgatgccagagcctctagaggatccaggcaggatcgagtttcttctgagggtagggatttgtccttgatttagttttgacccctacaaccataggtatgtaaccaaatacattttacctcttgcagtatcctttggtttcgtatccttgaagagctgatgacctttgtgttttagagaaatgacaatttttaggcaattaaagacattggcctcttacacttcttggaattttatgttatttttactaagttcattaaggcattaagaggaagttgtcacattttctcaactacgtttattacatttattagttaaaaactaaatttcactttgtaattttgatttctagcaattctgggttaaatattaaatctaataacctagtagattggaaaaagaagtagcttgggtatagtaattagactagcatgtttaagctgcagtagcctacataatcaaggccaagtgtgtgtgtataaaagatctcatttgtgtagtcttacaaggctaatggaggcatcactgaggctttataaataatgtaagttgggtataatgtagagtctccagagacggcagagaaagcatcattaccagccttttcaacctgcttgagatcttaaattgatttacagcactgaactggtgcaaaatgatacatcaggatgacatggggtcagcctgtaaaagtctatgatgtcagcctattagttcagtcatcataattaaaccatattacaggggtagctaagcaggagtctggcgttatacttcagatatgggtggtacatgggttttgtttatagtggaaaggctgagatggccagggataccagtgtgtgtgaaagagggaaaaggcttacagaactatgaatttctgtagaaaaatttaagataaatgcagagatattcaatctgaattgtataagtagcttttcatttggtagaggagaaacagatgctttagggatgctgataaggacctttgcagctctgatatgtgtactgaatgcttcatgtgagtttgaatttaacttggccttagggaccttataaaatatcagtggaccacatacttaactttgatccttttattacccctgaattttcactgtattgatatctactgacatgttatttctttaactagtcaaacttaccaggcctataccagaaacaaagatatttgaattgaacatataaacagttcaggaaaagaagatccttattttgcttaagtttctgacaatccttatttagcttatggattatctagggctctgctatcctagccatagtcacacgtagctttttttgaaattttattattctatttttttgagacagggtctctctgtgttacccaggctggagtgcagtggcacgatcatggctcactgcagcctcgacctcccaggcccaggcagtcctcccacttcagcctcccaagttgctgggactacaggcactgccaccatgtctgcctgactaatttgtttttgtatttcttgtagagacagggtttcgtcatgttgcccaggctggtcttgaactcctgggctcaagctgttctcccgcctcggcctcccaaagtgttggggttacaggtgtgagccactgcactcggctacttatagctatttaagtttaaattaaaattaaataaaaattcgttttctcagcagtagccgcatttcaagtgcttagtagctgcttgtggttagtggctgccatactggacagcgtgtatatagaatagttccatcatcacaggaggttctgctagccattgctgccccaggacctttacctcttctcacttgttaactctactaatgatttgtggagtcaaagatggaaagacatatataaactaattttatcactaactagctgttctttttaaaataaaacacaatttggaagggacagttgaagctactggataaaaggagtttgacttttctgtagatcttatttattattagtgtcatcgattctaatttggtttagagccttagagagaagaaataattgtagctaacccttttttctgaatttttactgtatgtatgccaggcattgtttataatacccatatctcatttaagcctcaaaacttccataagtactattgttgtcacattttacaggtaaagaaactgaggacagaatgattcagtatcttgcttcaggaggtacagtgaatgattatgatttctaatcttacctgggatatgatcgaggcagtccaactctagaaactccatcttaactatgttttttggtctttcgttcagaagacccaaatcatcattgttctgctgtgctttactatgccagtatagacatgacttggcttgtgtattttgtaggtctttaaataaatttaccttctattgtgcctttctgggctatcttctgtcgttcttttgtaagtgtttaagaaaggaaaaataatgctcatctaagcagcacataatttgaagaataaatctggcatgaaaataatgcatttcaaagccaaattagttttatctctgcttttctgcataattcttgtcactttcctcttgcattttcttacataatcacaaactgatattaagttaggaggaaagttgtagtaattcagtttgtctgtcttaccaaaattagtctatcttccctgagctgttaaacactgtaagaatagtaattgcaaattcattggggatttttaaaaaaacattcaacatctatttttgtaaatgttttacaaggtcagggctgtttaagaatcgatgaaactatggatcttgtatcttcttattcccaccttcctatcccaaaatgcttatatgtcatggtgagttaatgtgtacacttaactatccaaatctcatggtctttcgggtgaaatatgtccatgggactgccaagtgctttcataaacattaagatttgtaatttcctttacagagaatagagatacttagtattaaaagttgctttaaagattttctaatctggttggttcatatcaaggtgaacagtctgaagtccagagaaggtaactgacatccaaagttacctgtctagtgattggaaaagggaaagccaagatctggactcctcttggcattaagtgcccttttgttttcaggttttttttctccctaccacgctcacgatatttctgaggctttggtgtaagcatatccagtgtaatttagggaagggaggaaagaattttttggcctgttagcaactttttatacctaacattgtttgagctaagtaggaatcaaatctgacaaccagagagaaatgcttattttctacatattaaaattgattctttttcattctggagatggaaaagaaaagccctatatctaatttaatcaatgagaccttattagaaaatgggagatccaagattgcacaaagttcaaattaaagcaggcaactctgacatctagcaaaatatacgaatctcctcttgactctcgaaaacaaatcacattcctaaccaaaagctaaagtttggggtatttagggagctagggagtcctagggagagaattggacaggtctgaggagaaaaaggataatttaaatataaaaaagtggaaaaaatcggttttaagtcatagcatgtctttgaggttgatgaaatgttctgctacttctatatgtggttttactctttggtaccaagattttaggacatactttgataacaaataggggcatgtcctctttgccccaatctgaaacctcttgaccctttattttcctttcctgctgttatctggtagtacaaatattcagtctaatctgttgatctggcatctgatttgcagcaaaaatacctgaagtattttcatcactctgctgtagccacctttaaaaagaaaaggaaagagaagaaaaaggcagagccaaatagtattaatgtaattgcttaaaatctaaattaaaatactcatcttgctctgcgttattaagatggtgtcagttttagaggtgcagggctagtcctatatgcaaaacagtaatgtctgtagctattgcgggctgacttgcagaaatgagcggcttctctagaacattcatttgcataaaggaaactatctttcagaaaagaaaagccaaaagtttcataagcagtttcactccagtgactacatcagagttttagtaaggtactgggaactacagtatttgaacagttcagcatctttataatttttgttataagctaaaatctgaactttagagaagactctctcttgaaaataaagcattaaattctctaaggtgtgaggaagtccttacctggtgattttcccaaatctcttttatgttcttagtgtttgaaaaaggaacttttttttttttaataagaacctaggtttgcagtatagattggtttcttaacaaatattttttttgagacaataagcctggatctgaagaaagaacatacaattgttaattatgcatgtatatgcttttgagttcaggatgtaaatgaatattcactaggtcctgtttgggaagaggaggagagaggggtctctctgttgattcagaatatatttttatacataagttttaatgctttatttgtagtttccccttaattgtagggctgctgtactgtggatattttgctctacaatctgagattgttagggtatagttactccaactattcatgtattatcctctccctgtctttttgtgtgtgtgtgtgtgtgtgtgtgtgtggtttctttgtggtgtgcttatgcaaagtagaagtattccagacctttatagcttttttttcttttagtttcaaacacttcaagaaaaaaggtgggggggagactctctcaacggttataattaggcattaattaagccattattcagttaactaaatgcaagatcttttgtttgtttagatggaaaagaaacgtatctttttaatgaaggagggatattaaatgggcccttatttgatcattttgctgcagtattgtaataagtatatgcttcatttattccctgaatatttattagttctgaggcttaataattagagtatacacaaacatgaaaaattaaatgcagcaacattataagagccgttacaaggtagtataggagtaaattgtacagacaactcacatcaggaccactgtggcctggaaggacatgtgagtttgcataggcagaaggaagagggacattatagacagagtaatggcatgaaaaactgggagataagcatgagtgttgagtatctgtagagcagcactgtccaatagaatttctgcagtgatggaaatgttccacatctgtgctaatacagtagctgtagccacacatggaacagcattttttaaaaaattaatttatgtttcagtagccacatgtggttatcatatcaaatagcacagatccagaggcagtgagcagccctgcctgacctcagtgggtgttcctcatggagcctagtatggtggtgtggaggagatgctcagaaaggttgacttccagtgagaattttagggccttagagtgccagaataaggaaacattgggaagtcactgaaagtgtttgaacatgcagtttgcactggagggatagagcccagtgccaggagatcagtaagaaagctattgagttatgtgtgagatgataaatctctggtaaaggtagacatggaaagagaaggatttaaaaataaataaataaataaaataaaacaaaaaaccatgaaggcttggtgattatgtggctataaagtaatgagaaagagatgtcggagatatatccttaagtttctaaacttggtggctggaaaactaataaagatgttacttaagaatagggaagagctggttgtagaagaaataaaaattgtgcaaatgataaattagacttgatgtgttaaatttaaggtgcgatatctaagtcaaagtatgctacaggcaggttggagataaggtttgggaggacttgaaagctttacgttagactctctgcagtcatctgctgggtattctgagacaaccacaaagagagaaagaactggtggattgaatcttccattggagcccacggttaggaattaatagaaggaagaggctaatttgaagtagactgcctgagaggctgtttgacatagaccaaagaagaaactggaagaaaggcatggggtcagaggagtgggaaaaccaggaagccactggaagagagattctagaagtaggtttggaggggaaaatgtacagttcagggtgaaggagaagtcgtcagataatcatgtgaatgcaatttcagagaaggctgaatacattaagaagtgagagagtcttatattgccttaagtgacttgaattttaagatagatgagacctcttcatatttgaaggttgaggggaagaagtcagtggacagagagcaattggaggtgatggagttagccatctggagcacaagtgacaaatgttgaccgtggtaaggagggagagttgtctgagaaagaaacagaatggggtccgagtgagaagaaagcatgtggcagagctcctgtgcacttttgctgattttcctgtattgttggaggtaagtcctttcactgggatggtgaggaggaagatcagcacatggtaagggaagaagaaccaccgtaggtagtgtgccaggcaatctatagagaagtcaaattctaaacaattggggggaaacctggggtgaagtgtggtgaggctgctgtataggagactaggttaattgttactttttggtatcactttgtggcctggtaggcttagggatagcaaatgggttcagagataagactctagagtcagattgcctgggtgtaagaccaagccccaacacttacttgttttataagaagcctgatgaactaaatgaattgagaagcagtaagcaatgagaatcttggtaatgaagtagtgaaatatcaagtttgggaatttgtagatagagcatttccctaacaattctagataaaggtttctaagaaaagtatagaaattgaactaacagaagaatccctgtaatgattttaaaggttaagttaattagaacttaaaaaaataagtattgtattctgaatttttctgtggcttttattacagcattcattacggttaaaaacatttctttttcattaaaccaatatgtgcttaatgcagaaagattctgcagtggattcttgtcatagtgttagaaggaaaggggagtttgatttatgccactggggggagggttattaatagccagccacagagcccttcaaaatgtggctccaaaggcagaaacaataaaggaaactttttatagatttgatagcatttattatgtgaccaaacatactcaaaaacaaaacctgaaagacagataaagagatttgcaacaagatattgttctttacaagaaagacttatatcaataggaagcaccaccccaatagaaaaattggtagtggacgtgaacaagcatttcacaaacaaatgaaatgccaactgctgacgggaagattctgcgcctgtaatcccagctactctggaggctgaggcaaaaggatcacttaaacccagcagttcaaggctgcagtgagctatgattgtgtcactgcactccagtctgggcaacagagtgagactgtctcaagaaaaaggaaaaaagaagtacaaactactaatgaacacacaatgttttggttatgtcctggatcagacttgattgaaatggggatgatgtcttcctttttcctgtattttgttattctttgtatactaggaagtatcagtctgggaagactgggcttttctcatttaaggaaaggaagcccgaatttcccagcctcctaggagaatctggagtgtcaaggaggtacaagatatatacaaagtagagttataagaggcaggcaccctgcttccctccataacatggttttcgtccaggagtttccttattgcagtgtgaggggctatcagttatacacagtttctcagtcacctggcgtagatgatgaaccttgaagacaccagtgcttcctagagcatattgaaataggcccctttctctcctacctgaattgcagtattagattttatagtggcatttgctcattgatgtgagacgcagtgatggtcttggagtatagttttgattattgagatggacgagtttatgaggtattaaataaagtgagaaaagttccccttgtagtaaaaccttataatgtttaaaaaaaatgtaaaagttaggcatcagtgtttaattttacaaatttttttaaaggataataggggtcatgggttttctgtcagtagaaaactcaaactgtttttccctctgctctcacactacaacagtcaacacaaaatacttttgtgactaaatgtgtgtgggtttttcgctacacaccaaacactggctgggctgggtgtcttccaattcaattttgactctacctggagatagcctcagatcccacagattgaaggttcagtcccacccacctccaacataagtccaggcttctggaacttctggctgaccagcttcaagttggggctcctatgactccgctctttggattcaattaatttgctagaatggcttacagagttcggggaaacttacatttactgatttattataaaggatattaaaaaggatacagatgaagagatacatagggcaaggtgtggaggaaggggcatggagcttccatgcctaacttgggcgtgccacgcttcaggaacctctgcatgttcagctgtccagaagctctctgaaccttgtcctcttggttttttatagggcttcattttataggcatgattgattataccattggccactggtgatcaacttaaccttcagccccttgccccctcccttgaggttggagggtggggctgaaagtctcaatcctctaatcttgccaccatcctaaagctagttaggggctgccagccaacagtcaatcattagcatacaaaaagacatcactttggagtctccaaggattttaggagctgtatgccagaaacaaggttgaagcccaaatatatattttacagtaccgcaggtttaaaagtctattcatatgctgcccataaggggatgagtctgctggttattggtaggatccttacctaactgaattacattcagccttaagtgagttcttaccttgccactagacagaatcagaatttgtctgcgtcttctgtcttaccatctcctttcttttaaatgacctgcaaacattttaaagttggataaaaaaggcttttaaatctcaccttcaggctcacaacttggcccactagcatcccctacccatccttaagtcctttctgagtgggttgtgactgggagtacgggccctgaagtgatatgcattggtgagacttgtcactcaaactctttgagctaagtggtagagggaagagaaatgccaggaaaatcggtcttaattttatcagagacagtagtttttcatgaaagagagtaatgatacagtggatattgctgtagaaattatacagctggttgcgtatagcttgccatctcatctattacagcttcctgttttgctttttgcacattgctggctttgcagtccaacatatttaataacaacctctttatttttcatgtgtttatgtttgtgtgctcagggcttctatttagtttattcaagcttgagggaatatttgattagttttaaatgtttttctgttaactgtgaacaaaattaatttgattatcatttaaatgttggcacaaaaactgtatttatagcatttattcgcattcatttatagcatatatttgctgaagagttttgtcaatttgtgtgggctgagatgttctgtattctagaaaaggctcctttaaaaggggtgtgtcctcactgtggagttctccttttttgttaagctgatattaatcaattcagcaagtatttcatgcattcctgctgtgcatccagcactggactatgttttggatgggatagagaaaactgtaagtcattttctgccctgaagaagcaatctaattggtaagaggagattatgcatttgaaactttcacttcaaaatcaagggattggggaaaaaagtctgatgcatttgatagagctttttgcctctggcccacttctaccttactttattctgtatttattaattttttttgagacagagtctcaccctgtcgcccaggctggagtgcagtggcgtgatcttggctcactgcaacctccgcctcccaggctctagtgattctcctgcctcagcatcctgagtagctgggattgcaggtgcccgccaccatgcccagctagtttttgtatttttagtagagatggggtttcaccatgttggccaggctggtctcgaactcctgaccttgggacccacctgcctctccctcccaaagtgctgggattacaggcgtgagccaccgcgcccggccccagttcattctttcagcaaggttttgagtgtctgtatttctatttatgcttatgttcatagtgtatctcttagacagcttgataaagttgggggtaaggaattgtaagtacaggacctgcactgaggatcttctaactttaaggaacaatacaaacctgcttgtctagtctagcatctgttgtaatgccttttattacaattaccttattaactctttagactgagttcctcgagggtatggccagtgtctttatgatctttgtgctcgcacagtgcctagtgcagtggttctcccttgtctactcatcaaaatcgtgtgaacagctaccaccacaaagatgcctgggcccatcctattgaagggttatggtaaggaagcttttaaaaatactgttaatatccagcaacattaagaacggttgggctggcacacagtaggtacttggtgaatgaattttttcattttgttgtttttagaattacatcaggaaatatggtatgttgtgagttcattgtagttatgaaccatgtcttttatactctgtagcacccagcactgtgtgatgtcagttgtgggtgctcagacacaccagttaagttctgaggattgactgctttgcttcccctttttttcattgaggagagcagagacagaaaggatatgtgtgtttgacatctctcccttttccctttgtggaagaatcagcagttctgtgaatcccggagtctgcaaatgagttatagaaagctgttgaggcctgaggtgcttagattgcaaagagaaaaggagaggaaaagtggcagaatagagctgtggcttatctggctatgtcagaaaaatttttggttgtcacgaattggagggagacgctggagggttgcaaatagcttctagtgggtagaggccagggatgcagccaaacatcctgtaatgctaaagttgaggaaccctgaaatagaggataaaaaaggggatcaggagacagatggggtaactgaagtggtagtgtcatgaccgtttctgccacaccagcacacagtttgtgtgctttatcttcccactttccttaccccttaccacaaatccttcagagtccagagtactatttttgccattatctataagtagcattgtgacttacaactgtgtattaggtgttgaaattaatatcttagcatcttatctatgttaaaatatacctgaaagattcctttaaattttctttatctctacatctacttgattggaaaactattaacctcaagataaaaagagctagcaatttttgttttctttatgttttcaataaaggatcttaaaataatcagtgggaatgtaaagaaaattaatttcctttttttttttttttttttaactagacagggtcttgctatgttgcctaggctgaaggctggtgatcacagctgattgtaacttcgaactcttgggcctaagtgatcctcctgcctcagcctcccaagcagctgggactacaggcatgcaccacagtgcttggctttttttttttttttttttaaataaaggctatgttgcccaggctgatctcaaactcacagcctcaagcaatctttccaccttggccttccaaagtgctgggattacaggtgtgagccattgcacctgggtcaagaaaatgaatttcttaaaaggagtttaattttagtgttctacagattcatcatgagaaaaggattattaagatttgaacacatacaagagctaatggtgccaattttctgatgtcttgttgaatgatagcttataatgtcttattctaagctctttagattaaagtgaatttaattttgtcactgctgccttgataaaactcttgttttttttttcatgttctgggtaagtgggaaggtatcaagaaggaaagcaatagcaaaaacaagaataaattagaaagggatggaaggagatggagggaattttttaaaactataagcaaatccttgcctgttactctgccttatgcatcaaaccaagggggggactactgtggagaagcagtagagaggttaccttggcaggttccttaactttttttgtgcctcagttttgtcatctataaaatagttcttgttctataggactcgtgtaaggattaagagacctatttaattaaatttaaagtgctcaaaacagtgcgtggtgattcataatggttgtggttgtggtgatgaggatgatataaggatgacttttgattgtttttgaatatagttgacccttgaccaatagaggttcgaaccgcaggagtccacttatactcagatttttttctcaaccaaaagtggatagaaaatacagtatttgcagaaggtgaaacctgaatatgcagaggggcagctttttgtttatgcacgagttccacagggcccactgagacctgtatgcaaggattttggtattgggtggtggggtctgggaaccagtgccccaggtataccaagggatgactatacttctgttgaaatttgatggagaccatggatgcacttttatacagtgtttcccataaaaccacctaccactttctccctttgaagttggtggtgatagtgataaaagtttcttgagttttcaaactagtatgtttcaggtgttctgtaaaagtctgtttttttgcctatactctgaattccaagagaaagagtgatttatatgacataaaatgtttgtctttatgtttttataatatactaaaacactatagttaaccgtcatccatttacagattttccacagcaatttttgaatcttaaataggcatttctctagaatttactatgttctcagggcatattgtagttttattaatagtgtaagcaaaatataaatgattaaaagctttgatgaatcataatacattgtagaagcaatagttaattactagtaaggctgctttggattatctgtcccatttttcatacccactgaaacagctggttgatatttggactatttggatttccactgtagggtaagtaacaccgagctcaggatgcgtggaagatgtcgttgtagcacagactgtaggtcgctctgtctgcacgtatgtttctccttagatgaagagcctgaacaggcggtcctgtgactcttatcatagtgtaccatatgatatggttctcccatctctcccatacacacttcataaccataagcttgatggtaatgggaactgtgttatactcattttctttctactgcacctttatgttggtgataagggcttaaaaatttgttcagttaaatactggattaatggaaacgaaagccttcttagtagctgagcgtgtaaaggaggagaacttgggttctgaagtcttctgagaatattgtcttgggtttttccattgtaattggtaaataaattactttagggaagttagcagataagactgtactgaacaagtgatcagaggtagaaaggactagattcatgggcacagggctcacctaattctataggtgatgcttgcttatatctaaagcattatttctctaaaaccagtgaaaaactttgcatttgcttcttttagctcttaggtggagggagctctcacattctggaagagggggttgctgctatttgttcagtttctcctccaaggtggccaaatgaatgtttgcaattccagtccagtttttggcagattgaaaaagtctgtcattgattgtcatatgagagtggaatctggccgatgtcaatgtttgtttcagtggttagataaactttgatttttagaagttattctttcaaataacagatttctgtaatggaaaaaggacaggaccaaattgcttgtgaagatatttgaataacatagaacatttttattttaataagaaattcatgcattgaaaaatttgatggatatttgaacagttaataaaaaggggagtaagggtctaaaatgggagggaaacttacttttttgctataatatgccattttttgaaatggaattttttgattatgtgcctgaatccttaataaaagagtacattccattcctatccatatcatattaacccagaatagggtcatgtattttaccagaatacatttctctgaaaatcctatgcagatacactttcaattattttttttcctttatacaaagatatatcttgccacctgttggtcataatgctgtcttctagagccatgtagaaataactctcttacctactgtcagtttttatttatttttgttattgtggttttaaatttgaaaacagcaattggttaaaactaaaagtagttggctctcctgcactcccttgtacccagctcactcctaaaggtaactacttgttcagtttcatttatttttttctaggcctttaaaaatgcacatgtatatacatagacagtttttgtttctatttgtgtttttagaaagagaccatactatagatactttttaccacttcttactgaacagttgtggtatggttttcttttcatggtagtattgtacatgaaagtccatctgttttttcttattttattaacagttacatcatagtcgaatgtatcataatttatttaatcattccattattgttaggcacctgggttatttagaacacgaatatacttgaacatagatctttgtgtgtgttcatctgagggagctgtttcccctgtggctctctcaagccgtggctggtttttcccataaaccttttacctcttattgccaccttcagaccattcttctaccatcctctataaaaaacacccaacttcgactatcatgtaaaattataccactcattactcttccttgttagtcattttctgccccattgcccatatcgttcactctaattcctacaagatttaactcctggttgttattccctttatactataggttgagcgaccctaatctgaaaattcaaaatgctccaagatccaaaactttttgaggactgatatggcaccacaagtggaaaattctgcacctaactttatctgacaggtcacagtcaaaacttttttgtgcacaaaattattaaaattattttataagattggccaggcatggtggttcatgccagtaatcccaaccctttgggaggctgaagcggtggatcacttagcccagaagtttgagaccagcttgggcaatgtggcaaaaccctgtcactaataaaaatccaaaaattagccaggcgagatggcacttgcccgtagtcccagctattcaggaggctgaggtaggaggatcacttgaacctgggaggtctaggctgcagtgagccatgccactgcactccagcgtgggcaacagagcaagaccatgtctcaagaaaaaaagaaaaatttcagcctatgtgcataaggtgtagatgaaacatacattaattttatgtttagacttgggtcccatccccaagatatctcattttatatattcagaatattccaacatccaaaaatacctggaatctgaaacaccatctggtcccaagcatttcagataagggatactcaacctgtattcctgtacaggaattatggacatttagtccataattcttggactacttctcctccagtggccttgtctttggtcctacctcagatattcaatctctgggtagaaagattccataaaaaaagaagaaaaaaatctcgctcagtcttacagttcccataatacgggttttcatacttctaaaaattaaacaattctccaaccttacagttaattattttctttatataagcagtaaagtattatttgttcatgtctgtactttgagaatatatccagaatctgacgacttctgccacgctggttgaaatctttatcatcttgtaccttaacaattgccatagcttcctaactggtctccctacccaccactccctacttcgatccctgcgtccttcagtatgttctcaacccagcaagccacagtaattctattaaactctaagttggatgatggctctcctctgctcagatctcccagtgtttccatctcaatttgggtcaaaagctctgaagtctctgtgggtcccgcacataccttcccctgtgacctctctggcctcatctctcatttctctcccctcactccattccagcctcagtgaggactccttgccattccttgaacatctcaggatcattcttgccaaatggctcaaatggcttttgcaattgcccttctctctgcttggaatgcccttccccagataattcctttcagggggctgttcagataccacattcacgacgaggctttccctgaccaccagaatgtaggccccaccaaggcacagaaacagactttgaaaaactttttgtgtctctttcagtgctgcgtttctagtgcttagaatagtgcctggcatgtgatagctgtttgttgagtgaattgaataactgtagtggttactagtttttctctttttgtatgaagttagaacttcattaaacagacaaaaactagactgtaaacctcatttttttggatatgcaaaatattaaaattagccttatttgtgaacctgctttgttaatcactttgtttttcagcatgttataattttgaagtaagcctttcatgtttatatttaatctgcctaacccagtggattgggtgatggtatcacaattttgtggaaaagcaaattgaggctcagagttgttttcttcaaagtacagctactaagtggacagctgcagttcaaacctattcaagttaaggacacttgttttctaatttagaaaccatcttaaaatgacaaaaaagtaggtagaggttttatttgaaagcatggagaatgtgccccaatttctcattctgggttttgtctgccttttgtttccattttcaaaatatgtaaaataaatggttaactttaaaattcctgacaatgacagatcaacaagttttatttctctcacctgtggaggaagtggcctccacccagttttactgaattaggagggaagtgattttttcaagtgataaaaagaaataaaattccatgctcttcccagaggaggagttcaacaattgggaaagtggcgtgagaccatatgttggtttgtaaaaggatataacttgtaaagatgtttcctttgatgcctgtgatgaatatggatgtgtttcccttctagagggtcctgattaaattatgcaattaagagctgagctgaaggatctaaatataggaagagagttcaggccgtcctgctttgtgtctgtcagttcacccctacagatgtgcatgtttgttgtcataaacagcacctgtgagatcagtggagcgagagaaatatgttccaaaacatgaaatacagcaggatttttgtttctttttttttttttaaagggatagttttttcctcctgtagttgattccattttcatctgtgaatttgatatttggattaccttttttttttttaaacttgactgagggacttcagtattagtcagtactggtttaaaatatagatatactacttaccagaatatggtctggagaaagttactttaacctctgagcctcaagtttattactaaaattgagataatgatttctaccttgaagcattggtgtgaggagtcaatgtaataatgtttgtaaaaacaaccagtataatgcttgtataagttggtaactcaaacaatttcgtttattagctactgacgaatcattcataactagccacttacggaaatctaccacatttagcattctttgtagtctaaaattgctattttaggataactgactcaaagagaatagttttttctgagacaactaccatagactttctcctgggatagtcaataaaattaaatcttaaaatgtctgtggtcttcaatctttcctgtgtttgaggagtgagcatttgtaggccaggagtctttacagtgtttgagttgacatgaatgtgaatggcctttatcaggatgagcttatggggagctggacatcttgaaaggctaccgtgtcctgaaggacagtatgccattacaagcatgaatttgggaatgggggttcaatgggattaaggaatgttgtacaacttttagaggaaatggcaagaagatatagaaaagccaactttgtttgttgaagttggggacaataagaaaactttcaattgccttaactattcaagtaatcatctaatcagacaaaacagatgtgacagctgctattttatagggaatctctgtgattaagaaaaattaaccaggtactctattagcagcctagatttgtcaggatggaaggatttgtgtatgcagaacagaaccagaaagaactctttttaaagaattttctgatataatgaagatacgttaatagcacacttggcacacctaaaataaataaactacagttatatccttagagactcttgtcattctgacatccataagttccttgcttccttttcatcaaggagatgctacttttgaaattgtttggctgaaatttcacagcttcagtgaacttacaagtggtaagtagtaagctggaattcagtctacatggtattccttttctttttgattcctaagatttctactcacttaacactgttgagggaccaaattgcatctcttgctggcatgtcacttaagttatactggagagactggaagacttgctgtcagtgtctgcgctttaaacgcacagtgtctgcgctttaaaggcaatagtacctgcattattgcatcactataaatagaatttcacgaactgaacctctctcctatctccaacccccaatttctccagatttagaaaatcagtctccggcaaaaataaattttcagtgggaaaaatgtcaaactagctattctgcatcatcagtcccatgtttggaagtagccagatcaaggctgaatagtaagaggctcagtaagatggaactttacttgtggtgtttgtgatggtaggactctcctgctgctgtgaactgagagcagcagagttctgtgttctctgtgggtctccgtatggctttcttgtgtaggaatttggtttaaatacatttttcccctaaggactaaagcgaaatagagttcattatagcctttttagcaatgaagttaagcgctgtactttatgaagtacgttagcatcagtaaagagcaaggttttatccattttcatttttctttctgttctagaggttttttcctcccttattttgcttagtggtgagttttatttagctaaatttgactcatttgagattgagacaaatgttgaaagttgagggctaactgctgttttaaaacaggaaaaaggaatgcaggcacttcacctgtttcctcctccaatacaaatacagcaggtcctcagacaacctcatttcattcaatgccatttccttataacgttgatgagaaaaaacattcccagcctaggccactgtctgtgtggagtttgcacattctccccatgtctgcttgggttttctctggctactctagtttcctcccatatcccaaaggtgtgcacgttaggtgaattagtatgtctacattgtccccattgcagtgcatgtaggtgtgtgtgtgagtgcgccctgccatgaaatggtgtcctgtccaggggtggttcccaccttgtgccctaagctgctgggatcggctcgggccactgcgaccctgaattggaataattgggtaaataattatcttgtttctgttcatctttcttaaatgtatatatggctcacatttatttcagtgttaattttagaagtgttttgggtctcagaagtttggtaatgtttttgtgaccagaaatgtcctgaaggaacttaactcttgtttatataaattagctgatgctaaaattaattttgttttacatcgtttcacttagagccacagtttccaagaacccgtaaggactttactgtatctgaaaacctggttagctcctaactggagtaactgggttaaagaagcatttgaacattatttgttgaaccagatcaaagaacattgctactttagggtattttctggaactgaaataactagatccatttctgtttttatattcattgtaatggcattggacttgtatagcaaattttaacttgtcttttgcctgtctgccttaaccttaagggtagatatttatcattttccttaaggagctgtacaataatctttcatgctttttgttaggaaccatttacaattcctactgtctgctacttatcgttgtgttctacttgttctagagttctgtctccacctgtcttcatttttaggggtactgttttttaggggtactatttctctgtttggaaatgtgagcggatggcagtttctgcctcagccctcttgctgggccattgtctcatgtgggttgtctgctgttccacatttaagtaatagttatttcagctttatcaaaagtttgtaagttcccagttcttctggacttctgattaattcagcctgattttatttagggcaaatgattatgatcccctttccattttgtgaatttttcatattttaccaataaatctcattgcaattctttgcttacaagatggcttgaaagatgcaagcaatgatggattgctctttattgttttaaaatatttattggccttaaattgctgaaataatatggtttttccaacctttgtgtttttatgcatttttaaccctacgtctttagtgtataatcttctgtgagtctgtggtttctataagtgtcaggaatttttcaggtgtctttattatcctttgaaatcatgatctatttggacaattccatctttgtttggactatacagttgacttgagtacctaagtgaaatggagcaggttagaaaaaagtagcttgttttatagtaatgagaattacattacaagtcccctggcatgttcccctttgaccttttttgatgttttaatttaagcatctcaaacaaggcaagagttgatctcaccaggccttgaatcctatccaaaattggatgttaggatagatgacacatacatttctgtaatactaattaatattgccagttaatattgatcactttctacaacatgtctctgagatatcttgcatctccatggcatctaatgaggtgtattgtgaaatagtttcatatattaaaaatactggaaaataatataaaaaattagctgggcgtggtggtgggcacctgtagtcctagctgctccggaggctgaggcaggagaatggtgtgaacccaggaggtggaggctgcagtgagccgagatcgcgccactgcactgcagcctgggcgacagagcaagactctgtcaaaaaaaaaaaaaaaaatgctgaactacaaaattcatgcagtttgcttataatcactctgaagcccaccataggtctactctggaagctcaagtcttactttttctgtgtattcacaagaccagtctatctgtttaagaatatatctggcgatgtaagtctggaaatacgcacttaggtggttttgttacttagaaatatttgtttccaaaaaggaaaaaaaaggtcaaacaatttttttttttttgaggcggagtctcaatctgtcacccaggctggagtgcaatggcacaatcttggcttactgcaacctccacctccctgttcaagtgattctcttgcctcagcctcccaagtagctgggtctaaaggtgtacaccactatgcccggcttatttttgtatttttagtagatacagggtttcaccatgttggccaggctgatcttgaactcttgactggtgatcccccctcctcggtctcccaaagtgctgggattacaggtgtgagccaccaagcctggccgatcaaacagaatttttataaagttgtctttaaaaaaaagaaaaaaaaagtatccagctgttaaacattttcaaagtgaagttaatcaataccctgtacttttagttccttaattcttttgatctttgtgccatgattttttactattagttaagaaagtgtaatgaaccaaagaacaagaagtagggggagaaaagagttgcctgcttcatttgacaatagaccatttatcttctgttatttgcctttcttaaagtacggagagtttttggatttttttcccccagtcactttttgtagcctgtattttttgtttattttattgaataatacaattattccctcaatatttaatgggagcatttattttgtctgctgaattccatactggtgcaagaattataaaacagcctctagtctgaagctgatacagagagtggttgaacattatttgtctcctaatctttttattaaagggggttgtaacatttggtggttactccttcctttaaaaaacaattatatcttcatatacaaattagggtaattaaaaaaaaactttctgtgggaatttgggatctgtaacatattaaatggaagagagtgtattttgttgatattcacaggagttggataatttacttgttgctttactagatgaggccaaggtgaagaaaatgcccatttgttctgcaattggctgattaggcttcctttaaatataaagcaagttacatagcagttaagagtattttaacatttttttcttttaatattaaggaataacacataagttggaaaattaattagccgtgtcgagtagtataagagtatttttctaatttcacttctggcagttctgatagaaatccttcccatgggtgagactccttaggaaaacgttctgagttcagaacactgctttaaactacattatattttttttgcttctcaaaccagatcacactataaatccaacctgatttctaagtagagtatagatgtggcttgagataatgaattgatttttgtgggttttttttttttgtaattagcaaatatttgcttcgaaaacctttttataaaaaatcagaagttacattttttcattaaagaacgtttgaaaagtttagaaaaggaggagagagacacattactaatcttccaaacccagtcatggttaatattttcatatatttacatagttgttcatggtacatataaccaaccattttatgttctgcgtacagttttccccaaattattacgtagtctttatgaacataatttttaaggtctgtataatattccattgagtggatgtatgcagtttacttaggtatttttcaattattagatgtttctctttttttccctattataaataatgctctgatgaaaatctttgtgcaaaaacaattttccctttctggttcagaatatttccttagagtaaatttctgaagataaagttgctggaataaagatctcaatatttttaaggctgctgggtttttttttttttactagatgaatacttttttgttagtgtgaaatgtttatatttggacaagagggaaggaaatctctgtttgctgactcatgtttttattttgcactttaaactgataaggccacttagcttttgacataaactaaggcaggaagtacaaaaaggggcagaaaaaaagtagttgtcttgccaaggccatagtatcatggactcatttgagttccttatatgaggtaggttacctgtttgacttgtatattaaaaaatgcttaactcaggtaaaaattagtcatcagcctgcattttgttttgtctgggcatgtttatatgcaaagtgctgtgatctttcactttaattttcgtgagtggcctcaagacatttaccacctaactggcttctataatgtttggatgcccttggtttagatttttttttttttttttgctcccagtatgaagaaatctttctgtattgaagatattaccttagttgtctttctaaaatgtagatctaataatgctaattctcagatttaaaaccttccacttgtccatatgataagattcttcagtcttgccccttccttcatatcagcttgtatcatcatctccagcggattaaaccctagcatttctatcatgtgtctgttggaacaagccatttggaaaagtggtttaaaaattctggctctagagccaggcaaaatgggttcagatccaggttctgccacttatagctgtctacataactttggacaagatactcaactattctatattttattttccttacatgtaaaataaagaaaatgatagtatttacttcacagtaaatactaaggtattgttgctaagattaaactggttaatagataaacagcagtgaacagtgtttgtcaagtaatgaacacacaaaatgtttgctctattgttttgcaaaattctacttatcctttaagtctgatgttttctcttggaaaaaaatgttctgaaatctctggaattgttctttccttttccgtttttatatattattgtcttagtttgtaggccgctataacaaaataccatatagactgagtggcttataaacaacagaaatttatttctcaaagttacagtaactgggaaatccaagatcaaggtacctggatggcctcttctctctgtaacctcatatggtggaagggaggagagatctctctgggatctcttttatgagggcactaattccatttatgggagctccgtcctcatgacctaatcacctcccaaaggactcaccttctaattctgtcacctttggggttaggatttcaacatgtgaatttagggaggggatacaaatattcagaccagagtgttgttgatacttgttttatagcctttatcacatgatattagagtaagttaatagtaggtaaatgcacagcacatgggcctcttcttcggttattcttgtgcccatgggcaatggtataatcgtattatttcttctgactgagtccctggaaggtcacctaataaaacatctcagcaaagtcctttagaattagcatgcaggttagcaatttgctttatgggagttagttgtttacacactggctttcccaatggattgtgagctcctccagtatgttagacatgtttgcttctgtgtctcctgtgtctagcactgtgctaggcatacttagcaggtgcttaatacagctttgttgaatgaatgtcgatttgaatagttaaaacaaaaatctgaaatggtggttcttatataatacgttgcccaacacttgccttaaataaatacccccaagtgattttgggggtatttgtttaaatgtatttgttatatattttaaaatagccccaagttattttgatgcaaacttagccattctgtttaaaaattattgcttaaaatgttaaaaagctgtttttgaagaagagatggacatatagaatatgaagaaatacactccctctataaattattcccagaagcctagaaaaaagttcttgttcttttgcaaaactaaccttttagtaaaaggaaattatcatatcaataggtacactctgaccaagtgtgacttttgataatagcatagttttgttttctctttcctttaatgttaaatgaaaataataccaacttcaaaaaaactagtaaatttgggtgaactctttaaaaaggaaaacagcggacaccctgtggcctcccaaatagagttgacgctccgtatttggctttctaagttcttcaaggagctaaattattcatcaggcatttagtgagaatcagctatgtgccaggtactatgccaagttccaaaggtaagaaaataataagttggagtcctacattgtttcctgtagtgaagatgacagatgtgtagattatcacaatgtagctatagacatgcaccgtttgccatgacagctatttataataattataatttttaatttctgaggctaacgatttccccattctgatccatttattggtaatttgtgccttctcttttttatttatcagttttgctagggatttatccaattttattagtattttcaaagaatcaactttgattttataggttttctttagtatgctttaaatttctgctttcattttcttctactttctttgggtttatttttccttttaaaaaatctttggcgggtattagagtgttagttttcagcttttttccttttctaatatatgcatttaagactataaatttccctctgtgccttgagccacatcctgcatttttgatgtgatatttttacaatcattcagttaaaaatattttctatttcctctataatttcttctttgacctttgggttattttaaagtttggttcttttcaataacaatgtttttattgatttagttatactaaaatcaaagaatatgttctatatgattttagtattttgatacagattgagatttgctttgttattcattatatggtcaatttcagtaagtattccttgcgtatttgaaagtgttatgaattgtacagttgttgagtgctgtgataatatgtatatgaattggatcaagtttttaaacaatttttttctgtatctattgatttttgtttgcttgttttatcatttattatgttaatctcccactaggattgtgggtttgcctgtcattgtaattgttagtcttttgctttatgaatttgagactgttattatttacataaaatttggaatttaaaaactacatggtggctcaactcatcactataaaatgtcctttttttcttttttgtctttaaaaatctctggtgatacctcttacttttgaagtctgttttatctgaatggatagctatgccagctttttgggtggaatatgcatagtatatatttttccactctcttgctttcaatactgtgttcttatatttaatgtgtgtctcttttaagtacaatatggttaaataatgttccccacaactctcttagttgtcatattttagtcatttatatttaagtaattgcttatactttgggattatatctaaatcttactattttctgtttgtctcatctgttgtctccttttcatatgttttgcattaatcatttttaaaatttttatttgatttttagagacgctctcactctgtcactcaggttggagtgcagtggcacaatcataacacctatcataactcctaggctcaagcagtcctcctgcctctgccccctgagtggctgagactgcaggcacatgccaccttgctggactacttttttactttttgtagagatagggtcttcctgtgctgcccaggctactctggaactcctcaagctatccttctaccttggcttcccagagtgctgggattactgggctaatcatatatatttttttaattccatatttttaacccatctattagcttgttataatttttaacttattctctcagttgttgctttattatgacatgaattcataacttactgtactaatagtaaattatactttaccatggcctggataacacaaggaccttagaatgctaacttcatatatctctttttgctgttgccatgcattttaattgtacatatattttaaacatcacaagacattcctattgttgttttgtgaagtcagtattcatttaaacttacccttatttccccttcaggagctcttcctcatttcctgcagttctttgcttatttctagagtctttttccttctgcctgaagaattcctgttagtatttcttttagtgacaatctgctgtaaaccagttctctcagattttgattgttggaaagcatctttatttcacaatcattttttgaatgtgtttttcctctaaatgtagaattttaagttaccagctatttacgtttggcactaatgatgtcatttcattgtcttctggtttccattgtttatgctgaaatgtcagctgtcaacctgattgtacttacttgaaggtaatgtgcctttttaaagagtttcatcttaggttttcaagaattttactgttatatgacacattgaaatttgtggatttctctgtatgtatccttggaaggtgtagggcttcgtgaatgtatggttagatgtctgttgacagttttggaaaaatccttggctagtatctaaaaatattgctctgttacagtctttcttcttttcctttaagactctacttatgcagtgctagacctttcactagagccattatgtctccttagttctttatttttcattttttccctctctttgcattagtatgagcattttttaccagtcttcctgctcactaatcttttattctactgtatttaacctgttgttaagttcatcctatttaaagtctcattagttatatttttcagttctagaatttttatttcattcttctttatggattccagttctctgttaaaatcttcaaccttgtcttctctttccttgacatagtaaatagtaatcattaatactttaaagtctgtttctggtaactccattacctgggtcacccgttaggtctgtttctattctgttttgttttgatcatttggtcctgtttcttggtatgcttgataacttttggttcattgcatacactgtgaatttaaaattgtagtggctaaggttgatgttgtcttcctctacagagaatttgtttttcttctggcaagctgttagagagcaatacccatcacctagaccaaggctaggattaagatgattctagattggttgtaaagactgatccgtttcatttttgcccttagactggggcatattcctccaggagcttccattgaaagcctagactatttaccagggtttctcctcagcaggccctcaactccatttgttgctgtgttgttattttggggttcctcagcgctatgaggctactagaagctctgcttagtttttagcctcttagttacctctttctgctcggctcctagaccttttgctgctcatagcatagctattggcaaatccctggaaagagtggtgacgaatattcagctcacttcattgcatttcccctctctccaggatcttggccccctcaagtcctgagtgccttggttcctctttgatgcctttaaaaagctgggcttttgtttgtttgttttctggcttgtttgtttggaaggaggttggtctgatacgtgctactccagtttagccagggtttgtacaaagttaacctccttaacctttttcacattttatgttttcatgtgctaaagagtaaacagtttaaatgaggcaacttggctaaagaatttggtacagtatgtgtccatgtgctttattccttttatgtcaataaatagcaacatttttaaagcaggagatgtatttcctatcctatttgtcctgtagcccatagacacaggcttgttcactgaagaaataccctaaaatattactacatttatataagaggaattttcttttagcctaagaaatatttgtagaacaaaccaaaaaaacagagatattagactatttttttctccctgttgctttcagtttttgttgattgaggtgttttgaaatatatttttagaggttataaatgaatctaaatctaaaatattacaatatcttttgagaacttgggctttttaactttgttgcttttatcccagagcttttgctaacagtggcttactttttaaactgcttctcagtttactcatctgtaaagtggcagcaattgtattacctaactcaaaggattgtgaaaagcattaaatgctatatattagtctgctttggttgccataataaaatatcatagactgggtggcttaaataacagaaatagattttctctttgttctggagtctggaaagtccaagatcaaggttctggacaatacaggctctggtgagggctctcttcctggcttgcagatgatcaccttcttgcagtaccctcagtgtgtgtgcatagaggctggaggagggagatagcaatcttaagaccaccagtcctatcaggttagggccccaccctgatgaccttacttaactttaattactttcttagaggctccatctccaaatatagtcatactgagagttagggcttccgcatatgaattttaggggtcacaattcagtccacagcatactgtattacataaaagcacttaaaatagtacctagcacatggtgattacttaataaatgtggttgtatggtaaagatgattctaaccattctttttttgttttgtaggtgctgactgggttacttttttaaacactaggaatggtaatttctactcttctggacttcaaactaagaagttaaagagacttctctgtaaataaacaaatctcttctgctgtccttttgcatttggagacagctttatttcaccatatccaaggagtataactagtgctgtcattatgaatgtgacaagtttattttcctttacaagtccagctgtgaagagacttcttgggtggaaacagggcgatgaagaagaaaaatgggcagagaaagctgttgatgctttggtgaaaaaactgaagaaaaagaaaggtgccatggaggaactggaaaaggccttgagctgcccagggcaaccgagtaactgtgtcaccattccccgctctctggatggcaggctgcaagtctcccaccggaagggactgcctcatgtcatttactgccgtgtgtggcgctggcccgatcttcagagccaccatgaactaaaaccactggaatgctgtgagtttccttttggttccaagcagaaggaggtctgcatcaatccctaccactataagagagtagaaagccctggtaagtgagttattttatgttgatgtgctttgtgtgcccagtaccagatttgtgttgtttagaacatgaaaataatccctttgcttgtttttagttgtaatttaaaaatatttggggaaactgtgtgtgtgtgtgtgtgtgtgtgtgtgtgtgtgtgtgtgtgtctgtgtgaatgcaagagagaaagcccctgagtgtttcatacattttaacagcttagtcatctctagttaacattatgtcttgggagcaggctatgacaattgtcattgcagtactaatacctctaatttttaataaattgttttctttctaaatttattttttatgtctcacatggttctctgcatttctctagataaaattagctatgaattgtattctaagggaagaaaattaggaaagaaatgcattattgctgtctatatgcttaagggaagtacatcatgagggtagttgccagtgacttaaaccattctgaacttaagaacagcactttttatcatctctggcggaattttgctgtggcatatttcctatggtgaatatgaaggaattatatccttctatggaatcatttgatgctattactttataaaatatacccagtttttacatgtatagtcttttgggagggtatggtaaaggatatattttaaaatttatacggttttgccctcaagttagaatctacattctagagagttggatcattggaaagtgattagatattcaagcacttaaatgtctcattgtcgattgggaccaattttgttgatggattggctgttaatagttcctgggttactaaggctgtatattagaatcacatggctctcctcccagaaatcctgatcctgggatagcctggtaatctttgtttctaacaagtacttcaggtgttactgatgtagctattggattggtgtttaggaattactaaactagatcatgtaataacatggttttcaaataaaaggcattctgtatttttgtggaatatttaagacatattttaaaaaaagattttaaagaccagtagtataacaaacatctctgtatcccctactcattttaagaaataaaagattacgtgtaaactggaacccctgtttttgctcctctgattctgctccctttggtaaccactgttctgaatctgacgcttatcattctcatgcatgtttttatactgttattacatatgtatgagtccatgacaatatgtaatattttatatatttaaaaatgttacataatattggagtttctttgtacaacttatgttcatccaacattacgtttttgtgatttctagattatatactttaggattaccttgttaagtcctatgaaaaacactttgggaatttattggaatttcgttgatttcatttggggaagattggcctactgtgctcttgagcataatattatttagtgcacttttaagtttctccatacagctcctgcacttactagatttatttctagataactggtttttattgtatccttttaaaagttacattttgttacagttgctcttggttaagagagcattgccttttttctaacaactgtgctgaattctccttaccagtttggatatagacgttctttactgcttgttatatcagctgtgatgcagtgttcttttttctaaactcagcacagaggtacatgtccctcttctagccagaaatggaaatggagctaagagttttggagagtaaaatgtagtagataagtaatatgtaccagcaatattatttaggcacatgatttttttgatcctcgtagtaaccttaaaatgtattaatacataggtaagattttaattctactccatatgcgatgaaactgaggcccctacaagttaagtgccttgtgttagaactagaaaatagaggcatttgacatgaaaggcaaaattcactatttaaaagacactatgaatatgtcttctccatccatactccccctcaccctgcgctaaccttccagcatttcatcttgcaatgcagcaactgcctcctgactggtcacccccttcagtccattgtctacagaaagggatcttttaagatgcagacatgatcctcttgttgtcctacttttccctactcttgagaagtcctctagagaggtctgcacattctggtcctttcctccctttccaacttcctttgtactcttgcatgctttgtgtgcttgagttctctggaaacattccatgcacgtttcctctatctgtacctgtttctcctccctctttgtctagcccactcttatttatcgtttgtgtctagcacatggtcattacttaataaactaagtaattgtgtgatggaggtcagtttcattgggaaacctttcttgatacctcctacttcacacatatctccctactctgcttggggaggttaggtctcatttcccatagcaacctgaatttctttagaatgttcttcacacttataatgattgttctgttggtcttctctgcaagatagtaaataaagctccatgagggcagggactatgtgtataattaacatctctatttttagcaacaagcataatttgataaatttttgctgttaaatggtgatgctgatttttaatttaatatcgtcatttggccatttttttagtgctgaattttcagtttatctataccttttgaccatcttcttcccttctttggtcattttatggctattacacctctgatacaaggtgaaaagttaaaaccaatactgagatgaatttgttactcttaataacatatgtgctaataaaataatggggaagaggtggaaaactggcttacataggcattttgagactccacaaatgccatttcagcctctcctttacccaggaatcttgtgagtcatggatagaatagaacagttctggaaaacatggaggctgaggctaagatctatttaatttgaacatatcaagattttatgtatatttttcacattatgaagtgactgatgtgggaattggaacaaaggactttttccagagaccactatgaagcagtccctgtaccttctgaagagaaactctactaaatcaaagtgcaagaggcagccagatgtggtggtacatgcctgtagtctcagctactcaggaggctgaggtgggaggatcacttgagccccagagttgaaggctgcagcacactatgatcatgcctgtaaatagccattacgttctagcctgggcagtgtagtgagactctgtctcagaaaaataaagttaaaaaaatgcagcatagtaaaaccccatctctactaaaaatacaaaaataagcctggcgaggtggggggcgcctgtaatcccagctactcgggaggctgaggcagaaaaatcacttgaacctgagaggcgcaggttgtagtgagccaagatcatgccattgcactccagcctgggggacaagagtgaaactccatctcaaaaaaaaaaaataaaaatgtgcaaggtgacttagcccctcacactgccagaattgaagccctctataaagccgtacagagtacacctgggtattgtttttgtgaaatcagaaaaagggggtctggaattctaagctgcacatatacacagctcaacactgaattattttgaactttgtcactattttacttctgatgaagtatctcaaagaacagtttagcagtttaacatatttaagtctcccaaacttggtgacttctgctgaggtctcaatgactcttgaaaaaaactcaaaaattgagaatatttaggtttagagtagtggttttcaaagtgtcgtccacagagtagtagcatcagtaccaccttggaacttgttagaaaagctaattattatttttaaattgacaaataattgtatatatttgtggaatacagtgttatgttttggtacatgtatacattgtggaatgatcaaatgaggctaattaacatatctgtcacctcccatgtgtatttgcttatttctttctttttctttttttctcttttttttactgcctattctctgaaccatttttttgtttgtttggttggctttttttttttttttttttttttttgaggtagagtctcgctctgttgaccaggctggagtgcagtggcatgatctcggctcactgcaacctctgcctcccaggatcaagagattctcctgcctcagcctcccgagtagctaggattacagacgtgcatcaccacgcccagctaatttttgtatttttagtaaagatggggttttaccatgttggccacgctggtctcgaagtcctgacctcagttgatccacctgccttggcctcccaaagtgctgggattataggcgtgagccactgagcccagctgaacctttttttttttcaccatactaatttctttttggtgagtacatttaaaatccacccctagcctaagcaacatagcaagaccccgtcttaattttttttttttttaattagcgaggcatggtggcatgtgcctatagtcctacctattcagaagctaaatcaggaggatcacttgagcctaggaggtcaaacctgtagtgagctatcatcatgtcgctgcactccagcctgggtaagagagagactctgtatcaaaaaaaaaaaaaaacccacttttttagcaattttgaaatatacaatgtattattaactatagtcaccatgctgtgcaatagatcaccaaaacttactacttctagcttaaggtttgtaccctttgaccagcatttcctctgtccatgttcacccctccctgcagcccctgataaccaccattctaattctacactctacttttatgagtctattttagattccacatgtagtgagattgtgcagtattcgtctttctgtgcctggcttatttcacttaacaataatgtccgccaggtgtcacaagtgacaatttccttttttaaggctgaatagtatttaatttgaaaaaaatgttcaacataagtaatcatcagggaaatgcaaaaactgcagtaagatatacctttcacctgttagaatggctgttatcaaaaagatgaaagatatcaagtgttggcaaggatgtagagataggggacagccattttggaagacagtatggaggttcctcaaaaaattaaaaatagaactaccatatgatccagcagtctcacaactgggtatatgtccaaaggaggtcaaatcagtgtgtcaaggagatgtctgcactactaagttcactgtggcattatttacaatagccaaggtatgaagttaacctgagtgctcttcagtggatgaatgtgtagaaatgcaaattcttaaacccttccacagacctacaatactgaatcagactctggagatggggacagacatctgtgttgtaacaagttctccaagtgaaactgatactgcaaaagtttgagaaccactggtttaaggtatccaggcaagtcatcaagtccgattgtctggatgaagttgtcttgaattcagaagagatgctaatgagctagtcttttaaatcctccagcatttttaattttgcatgtttggatacagatagaaaattgctctttccagagttttccttctgatattcattaagatgagccctctaacaagatgggataagttgtctttaagtgggcggggaagttggggagaagtctatgcttttgttattcggctcagtgcaagttttggaattgttctttagagtgtactatctctatctctttgacaaaagtaatattacggacgggaataattgttgcttttccttaacctatgccatttattttcttataaataaaacagtgtaaaaaaatggtagtggggaaaaacaaatttatgaaaacactttgctacaacttgtgtttattatagttaacaatgacaaatgtgcaaggagaaaaaccttccttttgttgaaatttgccactttgaccattgctgaaaaatagatctttgggaaagtagaaaatgttaggaatttctttttctgcaaatgtgtgaatacttacaggaaagagaaagttcgtggagcttctgaagactatgtccctgctgatgatttaacaggtggactgtttacttggacttttactagccttcagaatcagggctacttattagtggttgaattaaatgtagggtttattctttcttaccagagtaaatgctgacagtggttaagcaagcaatctaactgtggtattgagaagaccattcagttgctatcttctgctattaaaaatgccttaatggagattacctgccattggccattttttttttaatgtttttcacatggttcttgaaaattatcttctgcactttgaacttaatcagcttgaaagggcatattaaatctgagcttgaaattctgagatttcagttttgatctttaaggcattagcttccaggtgctttcattttcagcatgatggctgccagctgtttaaaattcacgtaaaatcctcttcacctgttgactgaatgcatgttttcactctttggctgcctcagtcactgtgtaattcgtgtcttggtaaattttaccttgaagagaaagtcttaaaattatagaaatagaggacagattagttctcaccaggggccaagaagaggaaagaggggaaggggagtgggtgtagccataaaagggcaaagtgagagatccttggggtgacggaaattttctgtatcttgactgtatcaatgtcaatattttgattgtgataattttgtaatattctgtgatagtctgtaatattctgattctgtaagtaggatttctctgttatccttaaaactgcatgtgaatctacaattaccttgatttaacaaatggttttctgtaaaaaaaaaaaaaaaaaagcagctagttcagctcacactggtgctctttgtgcacttttcattttgtcacacagaatattaaaaagacgagaggaaatgtaataaaattaatattttataaaacaggctgggcgtggtggctcatgcctgtaatcccaacactttgggaggccaaggcgggcggatcacgaggtgaccatcctggctaacacggtgaaaccccgtctctgctaaaaatacaaaaaaaaaattagccgggcgaggtggcgggcgcctgtagtcccagctactcgggaggctgaggcaggagaacgggtgaacccaggaggtggagcttgcagtgagccgggatcgcgccactgcactccagccagggcgacagagcaagactctgtctcaaaaaaacaaacaaaaaaatggtctgggtgcagtggctcacgcctgtaatcccagcactgtgggaggccaaggcgggtggatcaccttaggtcgggagttcgagaccagcctgaccaacatggagaaaccccatctctactaaaaatacaaaattagcccacgtggtggtgcacggcctgtaatcccagctctcagaggctgaggcaggagaatcgcttgaacctgggaggtggaggttgtggtgagccaagattgtgtcattgcacttcagcctgggcaacaaaagcaaaactctgtctccaaaaaaacaaatggaaatctttaaaaaatgtcttgcttcaccacattgtgaatgtgttttgttttgttttgttttgtttttttgttttttttaatttgagatggagtctcgccctgtcgcccaggctggagtgcaatggcatgatctcagctcactgcaacctctgcctcccgggttcaaacaattctcctgcctcagcctcctcagtagctgggattacagacacccgccaccatgcccaactaatttttgtatttttagtagagacggggtttctccatatggccaggctggtctcgaactcctgaccttgtgatctgcccgcctcagcctcccaaagtgctgggattacaggcgtgagccaccgtgcctggctgtgaatgtgtttttatatgacatgtgtgtggtaacaaaaaacttcagtctagttcaagttttttttaagtttttaaatatttgggattaattagcaataatattaactataaaaattaaaataaggcattatgccgtgtgttcctgcgtgtctaaatttctttttattcagacatttaaagcacatgataaactaactcctcaggaactgtgcctgccccagaaggttagcatgtaattacagcactgtattctaaattgaatagaggtgtggacagagactgcgactaactcttacacactggatagaggctgcagctaactcttacacacccaggagtcaccacagaaaagcttgctcactctgacacatataacacatggtgttgcaatctgtgtggtgatgggatatatgtgtatgtttcagtgcagaaaggacttaaatcagtttacaggttttggacatacaataaaatagaaaagaattactaataaaatagaccagggaaaatacaatgaaagatcaagactgagaaaaactagcacaaaggtgttccataggagttactataatacaaatatactatgtatatttgtataactataaacaaaaataactatcgttattatatgtttgtaatcctagtttgcatgtttctcgtaatagttttggtgtaggggagaggtgtatgtattaatagcttggagatgaaggaagaaagttttaagagttaggagatacaaatcagcttttgcgcttgaaggttgggttccgggcagagccactgaggcggttgcagaggcttctggcaggaggggtgccttagggtggggtgggtgccctctggcttttgcagttgctcttccacagtcctctcagggcttcattcttcagtctacatggaagttcttttttggctttttgttttggtttgtttttttgagacgagatctggccctgttgctcaggctggagtgcagtggcgcagtcatagctcactgcagcctcaaactcctgacttcaaggcatcctcccacctcagcttctcaaagttctgggattacaggcatgagctaccatgctcagtctggaagttcttttttgaaaaagcacaaggtcactacttagatttctatccacacagcctagtggacatggagataagacagtgaacgctttccaggattttatcattggcattggcttatggttgataattttattattttcatctataatattactagaaacatgaaataatatagtcatgagtaggattttatacccagatcttttagtggattccagtgttaaatcctaggcaaatgtgaagcttgttattttaattttttttttcttttctgagcaactgttcttaaatgcatttgtggcatttgttttgggttattaattgatgaatagatactgtttcagccattactgtatgttacttttacataaactgtaaaagtacataagttgttatacatcgatggaagcagacatctagacaactacaatgtgatttgtttctgggcagaatttttctatcgccaaatctactttaatttgaaattttaagacagtagtctatagatcatacaaagtacctttctcatacttttgctttcctgacgtttgtcttctgctttattatttttcttcttattctatttctgcagtattaggtgggcaagagaagatattttcagatctttcagattcatttaaagtgcagctgtcttccaccctccattgctggttcatagagcagaaagaacaccagccagccagcagctgttaaaaagaaaacgaaaaaaaaaaaaagtgactgaagaaaaacagcagttttgaaaaccatagaaaaacatttgtcataatattttaaattaaaagaaaaaaaccaggccaatgtttccaagactagcttagggtgaaataataattaagaccttctgaattgtgctttttggcttattattcccacatgtggatcatcctgaaacaatgatttcttggaggtttgagtaagttttatatgtggttgagtttaggaggagtcacaggtgatttgccccatgtgggagtgcccggtggccttgctggatacttggaaaaaggagagaaatagaagaggatggtcggcttatgtaatgatctcaggctgattaatttggttttactttcagcctctttggtgctagatatcaaaaggccagagaacagaccagagattgctttctctcaaatatatgttctatccccttgccattttccccttaaaatgaaaatgttctccggaaagactaagcatcatgactaataagcatgaattagccagatcatcaaacctctgccctgatatttggaaaaatgagatttgtttggggaggagatggggaagcaacaagggtttatttgtttttgaagaagcagagctggaggatttggagcagctgtagggtggataccatgagcactgtggtaaaaatctaagagggcttgcagaatagtagagctaaaacccccacattttgttaatttgccagtttggctggggattggtgtagttgtttgatactggtgctgaatctagtttgaatgtctgcatgcagactcgtttcctctgggtttgggctggggtgggttgggctgagctgggctgagctgggccaggcctcctggtgtatgggagatggagagataatcacttgctgcttacccactccacttttctaattatcattgccctcagtcctcaacaggatttctctagcactgaagcctgaccataatactcaattgcaggtctgctccacataaaactatgtaactagaggtaagtgtaatttccttgataaaagatctagggtgttggaaacacattctgtggcttaaatcaagatttaggtcaacaaaggagtgtttggcaattttcctccagttctctaaattgtaatgttcatgctctggaatcttagcaggttttaaaaatggaagatcaggtttatattctgctatatcactaccctggttctaaaacagctctccaagagatgctgcttttcttagttctttattctttcgcatgagaaaagacatttttttatctaaattgtggcctggcgtggtctggcttatgtggtcgcacatcaccttcacttgactaattgcccagtggcctgtctgggatgttcagtgagaataaagtaaaagaagagtgattttataaggagcatttggacagcttattgtaaactaaaaataaacatataaataacagagtgaaattgccttatatgtttttgcctttgtttccctgtagtttccctatcagttctagctagctagctttgtagcagattttgcagtattttttgtgtgtgacaatacctttctttgagcacctgaaaagtttacccagggtatggtggtgtgcttgacagatatttaagtaagatgatcaacttgggagaaaagttgtggataaatgtctattcacatataacttacagcttttaaataggaaaaataatagctaatcttaaaatgttatttaagagaaaactgatgggagcatgtcacaaggacccagaggccagcttgtgacaaatctgagacaatttgatcaacggaataattaaggacagaagtgaattataaaccactgggagaaaaacaggaatccatgctgaagatgaatgggggagaaggaaaaggctcttgctcacagtagaatgccattgccaaccagtaaatgtggagttctttaggatattctggacaataaggccatttaaaggagatatttatttctctttagtagttaaaatatgatgggaagaatctagggttagaagggctggattgaattttggcacttgataactttgaccttgggttagtcatttgtcctctttgagcttgtgtttgctaacccataaaatgggggagtggttacatctacttttcaggttgaggataaagttaatgcatgtgaaaaggctttatgtactaatgcattcttgaaacaatatgactgaaatagtgatacaaggaacatcacttctgtgtatctttcttagaatagaaacaaaatttgtaatgtaagcaacttttcattaaacagatattcagaaaaggaatgatattattagaataaaatattaataaagttaaaatagtgactttttatgctttctgtgtgctggacactgtgcttatcacttaccatctattctcatttaattcttttttttttttttgagacggagtcttgctctgtcgcccaggctggagtgcagtggcgggatctcggctcactgcgagctccgcctcccgggttcacgccattctcctgcctcagcctcccaagtagctgggactacaggcgcccgccactacgcccagccaattttttgtatttttagtagagacggggtttcaccgttttagccgggatggtctcgatctcctgacctcgtgatccgcccgcctcggcctcccaaagtgctgggattacaggcgtgagccaccgcgcccggccctattctcatttaattctaacaacgactgccggaagatggtaccaatgtggctactgatatgtagaatttgagtaaatttttcacacaacttgtatctggaaagccaggattcaaattaaagcctaactgcaaaatccatgctgctaaccactgtgctatactgcttcccaaaagaagtctttaatcagttttctctcaacaaaaaggaggggcatccagagtttttggtagtagagaatgtgatcatatgtgcaccagctgcatgagttttggattgcgagtccacatctgcccttgaagtgtttatggaggcttctgtttatttcccattgatcagtaattttttttttttttcgagacagaatcccaccctgtcaccctggctgtagtgcagtggcgcaaccttggctcactgcaacttccaccgctccccgccccggccccggccctgggttcaagttattctcctgcctcagcctcccgagtgtctgggactacaggcatgcactaccactctcggctaatttttttgtttgtacacacacacacacacacacacacacacacacatacacacacatatattttttttttttttgaaattgagtctcactctgtcaccagggctggagtgcagtggcacgatcttggcccactgcaacctccacctcctgggtttaagtgattctcctgcctcagcctcttgagtagctgggattacaggcgcccgccactacacccagctaaatttttgtatttttaatagagtcagggattcactatgttggccaggctggtctcgaactcctaatcttgtgatttgccctcctcagcctcccaaagtgctgggattacaggcgtaagccactgcacccggcctaacttttgtattttttagtagagacggggggtttcactatgttgcccaggctggtctcgaactcctgacctcaagtgattcacccaccttggcctcccggagtgccaggattacaggcgtgagctaccgcgcctgaccataatgttctttattagataccaagtatctcattttcgtggaatatatttaattgcatcaaatataaactcagaatgagctgaatataattaattcagctgcagttacaaattaaagatgcctgggtgacacctaggttaatcatttacatatcaatcgtgcaatagatgaatagacaccataggctaactgctctttgtgtaatgactacctcttactgtgtgcttatggaactttgttaaaactaacttgtgcaacgttgagagacaccatagcacggtggctaagaacttggactgcagtgccaggctgcctaggtttgaatcctgtcttccctggttattggtgatacattctctatctcattctctatatctcattttccacttttataaagtagaggtaatgtagtacctaggatcagagttgttcagaggattcaatgagttaatatctggtacagcttggtatgtggcacttggtacacacatgtataagcaccatattaaaagaaaatctgagaagtactattattcctattttattattaaaagtgaggtttaaatagtaaattgccctagttaatcggctagtaaataagcagaatttccaattttggaactgagaaactaaaacctgcttctgactgttactatacttcatgtgtggcttttgaaggtatttttttttctcctgatgtttttaggttataccctgaagtttttttctacctctaacaactctcgaagtctctaataacagagcaccttccttctgtggaagtaaagcagataaatacttggcaaaagaaaggaaactaccagggtgaaagtaggaagagaaaagacagagagggaactaggtttgacaaactgctgtgtgccaccattcttgattctcagagtgctgttaagggcttgctatccctttggggaaactgaggtgggaatttatgccacctaaattcatacagctaagaccgtgggctatcttgatcccaagccagtgctttttccatgacaacatgcctcttgaccaaaaaaactgggccctgtaaattttctgtaagcttactataaggccatgccagccttttccatgtcatttggatttatatctgtatactgtcaaagaatcaggaccaatactgtgtagagttttttgtaagtgaaagggatgatctctagaaatttgacttaagatgagaaaaattgaagttcaagttccacagctacttagagacatagatagggccagacacctagctctcttgccaatgcatgtagtaaccatttgtcttcctgtacctaggctgtattcacccagaattgctgaaggttttgacttgttatatctgggatgaggtataagaatctgcctttttaaataagtatctaattcaggtgcaaagagtctgagggctgaactttgagaaagactggtttatatgaacccacttatagtagacaggtcaggaatagcaatacaatttacaaacatattgaaaaaacattcattctggacctattaggtgccagacactggcacctatttcctttcaaaagaaagaaaatcagttctacccacaaaggcattacagtccaggtgaagtaaagtcaacttagcaataaaatgttgcagatgctacaatgaaagtctgtgtagggcacactgaggcatagggaggaattcttttctaccaggggtggatagaaagaccgggaaaggcaccatgggagtgctgttagaactgagacttggaaatatggccaagtgagcaaaggtgcagaagtatgaaactagcagatgaaaactgcaaaaagccacaaagataggttgaagcaggaatctgaactaggttatggagtcatagcagacgttctgtgggtgcccagagaaggtatttttcaagaaaataatctgtggtatacaaaaagaatcattggcctggcattatctaggaagttggattctcagaagttgagttagatttaggtgatttttaggtaaatttagtggcttttgtttaatgctttatgatattgttgaatgaaattcatttatctatgtcaaattatgttcacatctttgtcttttaatatatttgtacttgagtaactatactcccagaaagtaaatactaccgtgttgctacctttaggcaaaactatcataccttttaaaaagatcttgcccccaaaaaaacaaacagaaggatggaaaaagaatttaaaaaacaacttccacagtctctttccagttttatagtactgagtgattgtctagtggttatgagcagaccttgattcacatcctggccctcaattagcagctgtgtgaccttgcatgggttacttagctaggctgagcctgatccttcacctgtaaaacagagataactgctgtgaggatttagtgatagacacttttcccaatgggcaaggacagtgtctgtcctgttgactcatacctgcagtgccctgcatgatggaggcatatatggtacccagtgaaccttatattatagaccctccgtactatcacctcatcaccaataagcagacaaaaaagtgccaccactcaggggtttaggctgttatatattttcattaaaatttaacctctattgaggttccaagaatcatttcttcagcgtaaagtttccctgacatatgctgaggtaaggaattttatttcataaatgtgtatactattaattttaagtgttcttactcttaccctttccggcacttcctacttgaagtgtctctgtttagaaggtcactgaacacactctactggggacatctgtctcgtgtaggcatcatattgggcacagctgctctggcagcttgccctccctttctcacaagaattgctgcagctgactggctctggggccattctgtccctagccctgggcctcctttctgcttgtaggtggcctcactgaaatgtcctgagattcaacttagatgccatctggggctgagctttggacattacaaaactccaggtgtacatgagcagcattctcatccatcagaagacttgcagaatttagagcaggaagaccctgtggagagcaagtttcttgctcttttgtgtgaggaaactgagtccctgagacattaagtgattggctcaaagtcacaaaggtggttacgggagtcaggactagaactaaggtgtcttgactctaacctaaatgcctttaccaccttctcagaactagaaagcatttctgtactgccaggtaacaggtagcttgtgtccgttacttcttttttttttttctgttacttctatatgggcaaacatatatcagaactctcttgcgtgtttaaaaaagaaaaaagctgctttctcacgaacatttggtgggtcacagcccacgtggggatttgtcagactttgtctcattactagactactttaccactgacaacttggtgatagaatttcaagcagtacttcaaaatcttaaaaaagctctcacatctagagtttacaggaatcctttccagagctcagcccctctctacaattttaactgttctttttcatgcttttccgtgtaccttagcaacgctgaaaagctgagtataatagcagaatcacaaatatctctgaaacttttgcttcctgaaacattcttagttgggtttccctgttgactggaaaagggattttatttttaacagagatgcacagtttgaaaagcagagttaacgtcactgagaaaaggcagaaatctgaagatttttttctcctgagagaaaaggaaaagagatcaggaaaagaagatagcttcagccttttaaagacataacacaattagacattttcaaatgggtggagaggattggtgaaatcacctaggggcgttttttcagaatatatttgaggggttagggtgggagaaaagatttgggtttttaccagagttagagctcctaggatacaagaaggacatacatggtctgatttttaaataactcggaagaaattcatgtgtacaaagaaagatgttttaacattgggctcttctttgaaagcagattcttattcaaattaaccaataggagcagcccttaaagagggaagtcccacactttagccatattttgaagttaccaaacaagggtcaccttagtgcactaagaaagtggttccccagaaaagtctacgttcccatatttgttttccataaaataggaacagcccgagacatagaacaagtcagagggaaacactgctcaccctctctcccttcctattggtgatctgagttgggcctgcagtttgcaaatcctcattctttaggctggtaaatctctcacccaagaaatgagaattgcacaaagaaagtgtgcttaaacatgaataattatctgaatgtttcttctttcctttttgcctaatagaaaacatattttaattattctttactgaaatcttgctgaaatgaaaggagcatgaagtgggggtagagcgagagacatctgggagagaaccacgcattgtccttcaggattccacacagggagagaggcctgggccttgttattttagagcagcacgtgtgtgtaggcttaacccagcctgactaacttctatgtgtctcctctctgccacattaatacttctttctagggctggcagctgttccagacctgtctctttactttcctgaatttaattagtcatcgcttatagttagtgtgaacatttattgtccaagccaggaggcttgaaattgacaagagtcacctattactaattacattggacaacaggtacaaattgggactatcccaggcaagctagaacttacagacaccctacttatacagtctccagggtgggtgtggtggctcatgcctgtaatcccagtgctttgagaggctgaggcaggaggatagcttgagactaggagtttgagaccagcctgggcaacatagcgagaccctgtctctacaaaaaataaaaactaactgcgcatggtggcaggcatctgtagtcctagctgctcaggaggctgaggcaggaggatcgcttaagcccaggagtttgaggctgaattgctctgtgatcatgcctgtgaatagccacagcactccagcctgggcaacatagcaagaccccagctctaaaaataataataaaatttgtttttaaaaaagcaaataaggaagtttttgtaagtgctgctgtggaccatgtggtagtaattaccagttagaagatacattggagaagaagcctcatttaatctcattgaaaatagcaacaacttgataaatttaacaagaaatgtgcaaatcctatatgtggtgttaggaactgagttgcatgccccaaaattgatatattgaagccctaaccccaagcaccatagaatatgactgtttttggagatagggcctttaaaagaggtaattaaattaaatgagaccatgagcatgggccctaatgcagtctgactggggtctttataagaagagggatgaaacatgcagagacctcaggagaaaaggccatgtgagtacaccctgaggaggcagctgcctgcaagccaagaagagaagcctcagggaaaccaacctgccaacactttgactttggatttccagccttcacagcaacagtgagaaaataaatttctgttgtttaagccgccagtctatggtattgtgttacagcagtgctagcaactaatgcagacaatacttgtagaacacaaaagtaggcttgaacagaccttcctacatcttcagaagggcatttcagcatcatcaagatattaatctttacttaatttatgtatataatgtgacctcaataaaagtattaataactttttttaccggaggtaaacaaggtgataactgaagtcatatggaaagcttaagcatgcaaacaaaacactgaaaaggaagaactgtgagaggggctggcccctatcggatattaaaatctctataaagcctttataattaaaacagagtggtactggggcacagactagaacaggatgaaatgtagtggaattaaatgtctaaaagactcgaacatttatggaacttttttaaagcggcaactccaatcactgggtcaaagatgggcttttaatgaatggtgttggggttaactggctaaccatttagagaaagataaaattagatccattcctcataccacaaataaaactaaactccaaagggatcacagagctaaataaattatgaaactttatatgcactagaagtatgcatggatgaattcctccttataatctgggtataggagaaggctttctaggactcaaaaataaatatgcaataaaataatatgttgataaatgtgcctaccaaaaaatatacataagtgaaaagacaaatgatagtcatggtaaaatatccacaacatatatcacaggctagtatctctagtatgttgttttttttaatgaaggatgaaaataccaaaaatgggcaaaaggcataagccaacagttcaaagaaaaagatagaaaagcgctgtctgaaatacatgaaaagatgatcaactttcactataagagaaatgtaaattaaaattgcaccaaaatgtcatttgtcacccatcaggttgtcaggattcagaagcttgacagactctattctggaaggtatgggaaaaaggcactcctatgtgacagtgcaaaatggtgcaaccattggaaaggggtacttgacaataacaaagttatatatacatttacccattcacccagcatttccacatctaggaatttgccctgaagatacacctttgacagtgctaccatatatatgcacagtcattgcagtattacattttctggtaaaatattgtgaaatacctgaatggccagatatgggagattgttaaatcacctttggtgttgttatctgtcaaaccacatgaggaagacctctgtgcactaatatgaagtttttctcatatataggtgaaaaaagcaaagtgcaaaagagcctatatagtaggctatctttctttttagcagtaaagacgaaataagaaagcatccatttatctgcttgcttttttcaagaagaaacacaggataagccagaaaaaaatgaaattggtgaccctaggaggatgttaaaattggaggactaagttagaagggatgtggtagggagtatattgttttgactttaaaatcatgttaatgttgatttaattttgctttttaaatacacacaataagaatgagagaggggaactcctaaaactaagcgcaaatagcaacagatatattcaaataaactaactgtgaaagggagaaattgaataaaatttcaaagtaataaaataacactgaagagaagagagggatgaatccaagtagattttgaatgaatttgaatgaatccaagttcttagtataccaaaaaaaaaaaaaaaattaaagagaataaacccaaaacttgtcttagtaggtttattttataatttctgaaattttttcagtgtatcgtagaattaagcacattcataaatattttgatgttggtagccaaggttctcactgttgaaataaggagatacagataggaaatagagaaaggcaaatgaaaaccctgtggagttggcttaacacttggatgtaacagcataacccaatttccagtacacacacgcacacacacagggcttagaatcaatgtggctccagtagacatacagaagacagccaaatcccagattttggtttctaaatactattcctcactaaagggaaccagagattgctggagtggtggaaagggaaggtaagagataagcctggaatgtcttgttccagaaattaagaaatactcaaataattggaacatgttacaaaggcacagggactagcttgaacaggcacccaatggccaaatctaagacaatatgaccatcaaaatagataaagatatttatagattatagctcattgattaagaatccatgaagccatactgatgactgttatatataggcatatagacacaagagatggaaaagcacgtcttcatattagaattctgactaataatgaaggaataatggagttaaagaaaattcagttcacaaccattatagcaaaaatttattcaagcaaaatggatgctaaatataggggataaagcttgataaggaacaggatatttacacagtctcgtggtatctctcactacttattaattacaaaaggaaagatagagactgtctacggtggaagaaatgcacaataccttaaccaagtgatcaggattaaacctcaaacaggcagacacatcgtgtgcttctgtgcatgtgaactgagaagggaatgataccacttatctagtagtccaaccaaaaatctcagagtttaatcacggggaagcattagagggacccaaattgataaacagtctgtaaaataactgcctgtattcaaaaatgtcagtagcatgaaagcaagaaggaaaaaagacgctgaagaactattccagattacaggacactaaagaaatatgacaacgaagtacaatatgtgattctaccttaggtcctgtatcaggaaattgctacataggacatggttgagacagttgacagagttggaatatgattttatattagataaaatcatcaatgttaaatttcccaagtttgataacaaatgtgtatatgtaagttaatgttccttttgggagttactctgaaatgctatagggtaaagggacatgtatgttacctgctctcagataattcagaagaagtgtatttgtgttctagggctggggaatggaggagagagaatgagtaagttaatgtggcaagatgttaaaaattggtgaatctgggtaaagggtatttgagtgttctttgtagtattgcagtttttctgtaagtttgaaattatttcaaaataagttaaattttttaaagttcatagaagtttttataactgcctcaaactggaaataacccaagcattgagttggttttttttcccccaacccaagtatttagcagcagaagataaaattgtatcatcagataaattgtagtttatatatataacaagatgctacacacacacagcattggatgagtctcacattttgaggaatacatatgcagattttcaacttgggaagcagaaatacattgccctttgctgtggctattgcaaaggctagttcttcctccctcactgcccccatctgcaagtagtaggaacaagtaagtccccagttctaaaactgttaggaaacaagagctgctaaaacagatgctccactaagtgttaggctggtgcaaagttgctgcagtttttgccattaaatgcaaaaactgaaattatttttgcaccaaccttaatggactctgtgcgtgtgtgttgtgagagggaggggtcctctgaaggatagaggacatgaaggattgctgtctggtgctgcatttgtggggagtggtttaggggccaatgtttcccccttttaagggtaaaaatcataattgagaccatagctagatgcctgtaaaaggcaagttgggaaatggtaattcaagtcacagcagctaaaagaaaagggaatgtttgtcattgcaaaggtaattgaaaggtattggactgttttggaatataaatttttattggcattggggatcccttatcaggaatgtttcttcaacaaaacaaaagcattttatagttcagatgactattgaaaggtagaagaagaatttatgcttttaatggtttggtttgggaagattccatcactgtactaaaaagaaaatacatttattatatactcaaaagatttgttcctgaaggatcaaatagggaaataacaaatctgatgctatgggattatgtaggagtataaaatatagcacatgagaaattttaatacttttttaaaaacctgtttttatctaaaaagcaattttcagctcataaaaaagtgataatccaagtgttaagagcactttttactgtagaaatgatataaattatgcatagattccctggaaagccctcaaaagtctgctaaattcctgttgccaccaaatattgtttctttggggaaatatattctgattcctaacaaccaacaataatcataagttttaaatctctcctctctcctctcatgcagtttatgaaacgggctgcttttctgtttgtagctgaggccacaggagctggagggattgcaaagacctttattagagcatccatctggtgaccctggcagggaaacttaggatctaaccctaggatctggctagggctctgtaactgactgttagccagccctgcctctccaggataattatatttatagtggctttgcctcaggaggtttctggaggttgatgaccatgccaattattaactccttagcttcctaatgtagaacatttaggagtgacaggagttgttttctttgcttctcaacaggtgcctacctattgggccgcctttgtaccttgagttttcagttagcaaaatgtgaattgtatgaactaattcttccttgacctcacaggtggtggtaaggattcttgaaaagtgggtaagatccttagaaaaaagatgttcataaagtgtgactcctaggacaggatacaagataaattctgtcccacaaagcacctcatattttgtataattaactatcttcatggcatttgcattttctacagttcactgattttacctcttcagctttatttactatgctgcttttttgtgttaaagtgaattagtgtgtcagcttaaaacacttgtggtgaataattcatatcattcaataagcattaactcttaaatgtgaagtcttatcagccagggctgtgaaatataattgtcaatggtgataaacaattatgctttggtttttagtgaatgaaaaaattaagaatgagggaaccttaacatttttaacctaaaagattgtattttgccaactttccttgggcaatttgtgaatactgcaaatctcaggcatatgtcatcagtgattctaaagggattgtatttgttcctgcatttgttcttgagggtaaaatagcttttcatttgaatgatgcttttgagttggcagcaggacagggatcagataatttgttgttgtttacagattatgttttactttattgtgatgtaattatagatcataattctcatgtttgtccttctcttttttcccttcctttttctagtacttcctcctgtgctggttccaagacacagcgaatataatcctcagcacagcctcttagctcagttccgtaacttaggacaaaatgagcctcacatgccactcaacgccacttttccagattctttccagcaacccaacagccacccgtttcctcactctcccaatagcagttacccaaactctcctgggagcagcagcagcacctaccctcactctcccaccagctcagacccaggaagccctttccagatgccaggtaggttggaatgttcagtgatgttctgtagtcatatcagacagtgttatcacagtgtcacggaaaagctgggtcaacctgcagtggagggaggttttcagccctggtatatgacatagtgctctcgcacttttaggatacaacttttggtgaaaggagacctcatagtcaagtaagcaaatgtcttattttatttgtcaggcacagatgcttgaataagctatattttccccttgtttttaaaaggttttgaaacagctgcatccttctgggagtggcataattgttacagtctttactcttgataaaaagaaaaataccgtgttacacacatttgctcttatgagaacacaacctcaatcagcatcgttttcatacatggaaaaaactcctgttgcaagtgcaacctcagaaaaaatatttcctgagggatcccaccccctacttaattaaattcattcaaatgatgatgtaatcccaagaaacgtatactttaacaacaaaggaattacaacagaagtactggaaaccatctgcttgttcaacttagcaaagacaaaaaacaattatcctctttttctagacataactgttggtgtaatggttatcaaaataaatgattaataaggacattatatatttttaagttacaggttaatgagcaagcatctccaaaaaaaaaaaaaaaaagagtgccaaatttcttgccagtagactttaagaaagataccctaaacaaaaatatacttaacatctattaatgttttcggaagggaaaatgactgggcaagtgtgtttattgggctgcttgaaatgtttttaagtaaatttgaattcaacatcagtgctaggccttcaaaaattgaaaagtggtccacatttatattgctttcttttatttatgtatttattaccttcttttatttaaatcttgtttatttcacattgttttgtccggttttcagtccaaagctgtttgggatgagggttgggagacagactagtttaaaaatcaaagtaactggtgacttcctgtctacctctctcccttcctcctcaccactaacctgtatgatgggcaggttagtggtgaggagatacatttcagaagacttttgagcagtggcagcccagagtggccccaagattgaattaaaggttattgcttgaatttacactttgtccctaaatgtcagggattaaggcaaaggccaagtaatggaaatatggaaaacagttgcaagggatgggaggaggtgcctgtaggaatagtagaatagtatcaagaattatcgggttcctcttggttgtgctgatgccataggttgccaatgaaattttcaccagcttcttggcagaaattcattgacttgggctcagaggaggctctttgtctttgttcctggcttgagataaagccgagtcagccttacagctgcagagaagaggctgaattaaaagaagctgaaaaggggcaaaagaggcatccagagaaggtcccagtagtcccatctcagtactatgagttgttgcttgttagcagctggatgtgaagttaccaggttgtgattcagctggagagtgagtcttggaaatcactggggctctctgaaggaacaacatgagttgtttgtatttgacagttgctctgagtggtctcgattacttatccaaacattcacgattccctcaggtaaaattttgtctccaaggctctgacacatatgctagatgggctcatgatagctagtgaggagcttgcttttggatggaaaaggattatttgtgagaaacctataccctttgttttatattaagaaaatgcaagacttgtgttagtgttctttgtttaaaaaatcatgtttgcctcttatttgccagaagaaacatatatgtaaattctgaaataggagatagctgtgataaactgattcattttctgttattctgttactagagattttaaagctagtgattatttaaatgagtagggagagtgtggtcctaacagattccctaaagtcatggaaaattaacagttcaaatcagtaggctataatgaaacttggtgaattttctaaaagcccatagatttaatgcaaaagaccctgaagctccttttcttaagaagtccagtgaagctttcagaggttttccatctatcagtgaaactgaaatgcagaggtcctctcaaagcagattatattaaagtgtgcttaaaatactcttctgattgcttttaaacagcatgatcctgcataggcaaacagcttctggaactggcatatagtataattcttttcctcccactgaattttcacaaaaatgtatatgattgtggcatggttaatacttttcagaaattgtacatcaaggcagtgcctgtagcctttagtcttttaatggggagattgaaatgacaacttgatctcttgagaatttcagtacagaagaggatacgtgttttgagcatgtatgtttactaagggttaagaaataacttctttaaaaactttgtagctgatacgcccccacctgcttacctgcctcctgaagaccccatgacccaggatggctctcagccgatggacacaaacatgatggcgcctcccctgccctcagaaatcaacagaggaggtaaaactaattgctgcctgttcccttttttagagtctaaagtttgtccagatgttactttctctcacaaatttttattagtctttaaaaagagagctacttgagaaaaatagagcccaatgttaagagaagctcactacaattgctggataacaagtaagtctttaatttaaagaacaaatacactgacttaactaatgaagatctgagaataattttgcagttatctgtttagatctttaatacttaataatttttaactgatgatgaaaattttttttttgtttttttttgagacggagttttgctctggtcacccaggctggagcacgatcttggttcactgcaacctccacctcccaggttcaagtgattctcctgcctcagcctcctgagtagctgggattacaggtgcacaccatcacgcccgactaatttttgtatttttagtagagacagggtttcaccatgttggccaggctggtcacgaattcctgacctcaggtgatccgcccaccttggcctcccaaagtgctgggattacaggcgtgagccactgtacccagccaaaaagagtatttttaaatgaacaaaatggtatttagaaacaataagtataacagtactgaagtagagttttcactggtgatttccaaagttggaagttggtataactgggctgtccaaaggctttcttctgtaattaggatagatacacataaaccccgtctgtttttcagctcttatgtatgtgcaactacaactggaacaaactaatagaatttcttgctatttgtttctaactttgttactaaaaggaattgaggcacaagtttttccccttctcagcctgaagaacttgcaagcagaaatgaaaaatttctttccccctttagtaaagggtgggtctttgattccagcgttgtatatatccttagcagtgaccgagtggaggatgccatcattcttccagctctacataggcaagtaggatagacttaagtgagcagagaactcaggtaaataagttcggtagactctctgagaaatctgttagaatccacagccaccctggcaaataaaactgctcctaaataacctctcatgaaagaaagtgctttgctgctgcactcaacacatggcatgggtcatgcaatttatataatgtttatgcaaattgaagttaaagtacagtttggttactaggtatgtcttgtttcattttagtgcttttttattaaaataggagatacttattaaaataggagttgcttatatttttaagtacttaaaattgattttgtctctatgacacattatacagtggtaactgcatgtcattatacatttatccaaacccataggatgtacaccataagtgaaccctgacgcaaaccgtagactttggttgtaggtctgtaggatgaatgtcggttcatcagttaaaacaaatgtgccactctggtgggggatattaataatgagggaggctaggaaggtgtgggggtggggggcatatggaaaatcactctgtcttatactcagttttgctgtgaacctaaaactgctttaaacatcgatttaaaaactggtgatgaaggctgggcgcggtggctcacgcctgtaatccctagcactttgggaggccgaggcaggtggatcacctgaggtcaggagttcaagaccagcctgcctaacatggtgaaaccctgtctctactgcagatgcaaaaattagctgggtgtggtggcgggcccctgttgtccgagctacttgggaggctgaggcaggagaatcacttgaacccaggaggcagaggttgcagtgaactgagatcacaccattgcactccagcctgggcaacaagagcaaaactcagtctcaaaaaaaaaaaagaaaaaaaaaattggtgataaactcaaaggacctttcttggatgtgcagtgtcataaattggaatgtacaccactttaatcattatgattttttaaatcttttttattgcctctgtattttatggttcctgattatctcttgaacatcttatcaaacataattctgagtcaatgaacactctggttgggggaaataacccctatctcacacatctgtggaatttatatttggggaccaggataccaggagagaataggcacagtaccacactattaggagcatgtggacccagtaactattattactaaacccaaaatgtctgatttcaggaaacagatctttaaattgctttaagatttttttcatttaaatagctttaatttttttttcctttatagtttatagtcagttaatattttcacgaggaaggaatgttggccattttttttcttccccccgctttttttttaacttgtttttaacctttggtgattttcctagagcaggggtgaacaaactacagcccacaggccaattcagcctgctatctgtttttgtaaataaagcattattggaccacagctgtattcattcattacatattgtctatgactgcttctgtgttacaagggcagaattggatagttgtgataaagattatacagcccataaaatcttgctggcctttcacagaaaaaattcatcaacctctgacctagatgaatagtattttgaagtatcctgatagctgataaaagccttctgctaataatgttgcagtctgctttaagatttggcacttgtaaatcactaaagttttgctctttgaattatagcaaattgatgtggtagagttgcttagcaagcagggaagatagtgtatgtttttagctaactacttacatatgtaaagcgactaacttatgtgtgggttttttcatgagtattttccttgttttttttttgtgtgtgtgtgtgtgtgtgtttgttattgttgttttgttttttaccaaattctaaagtaaagtgcattttagtatttgtggaatttgatgttaagaacacagaggtgcttctcccttagcagttgtagtctgggcttctgatgtggactttctttcttttcctccttttattattgtacacccaagacttcataaacctcagatcattatatattggtatgctggaaatatatggtttgtattcctggaatctctaaaggagtggtacaagaggttttactacagaaggaattcatctttaaaaccttttagttgcaaatgtttagaaccatgttctgtttggagatttgttagtcttaagagatttgacttaacaagctgcatcctgtcagtaaagttgggtaatttccattgttggcccattctgggaatggagagacaaaacacacctgctctgcatgacttaaagcaaatataaggaagttagcatgaaatctggatgagaaagatatgattcattctgtaagaatggccagctggcaagatttcttcctgagtttgagaactggagcaacactgtagctgtgatagttattggcaacttaatatgaggtaaagtaacttcttatcaataattagaaactgattttcatggctttgaataagcataggcatacttagtctttgccaaaagtaattcatttttatgccagtacctttggcatattttcagtcttctattgttctcttcccacttattttttcacttgtcacttgtgtttctttagatggtgagccaaagtctgtggtaggggtgatttccatttctgcatattacagagcaattagcatattgttaatattcagcaaaagtttttgctgtgcttccttagctggtgttttggttatctgatagtaattggagaaaattgttctccaattttctccaattaggagaataaggagagtgtcatattaagaagtacctgctttaaacatcatagaaaaactgtatacattataatagcaattgcttttccagtgtcttcattccatgatcctgagccaattcaacaacacggtttcagtttttgagagcctgaggcactaaccttggttgatataacattttctttcctctagatgttcaggcggttgcttatgaggaaccaaaacactggtgctctattgtctactatgagctcaacaatcgtgtgggtgaagcgttccatgcctcctccacaagtgtgttggtggatggtttcactgatccttccaacaataagaaccgtttctgccttgggctgctctccaatgttaaccggaattccactattgaaaacaccaggcggcatattggaaaaggtgagtttttgctttaacctctttcagatgtttatctgttgtgtccctgttcctccagagctgacttaaaatcattcctgtaacaaactgttgtagcaaagaccaggtaatgttcacttgctgcagtttgtaaatatttttccagtttctgctatctggaagctcttgcagtcagtgatttttgtggtcgatcaactcataatattgaaattaattagttgaaattatgatttgccattttaagacactattctgtatgatattttgctgcagaataaattggctgttataaaatgaatcacaacctaaaattaaaagcaaattacagttaattgcttaattgtatttcaaatgaataccataactcagtaaatagaaaagaaagaactagattttagcacaaacatcgtgcaaggtggcacgatagaaccctgcagtgattgtacccccacagggacaccaaattgaacaactgtccatataagacagcaccttcaaaagaacaaaaaatcaggcatggatatatttataataagaaaaaataaagaccaaaaaacaagcctagtaagttatgaatatagtaagtgactatatatcctcagcctaggctgagtggagtagatagagtaggggtaggatttcaaataaatcccgaactctttttagtaaacttgattatttcatagcagtatgagtgaaaccattctgaaactttcatatgtaaagatgaagcaaatgactaaatgtgtggatattgttgggagcttgggtttccactgtggaaaacagacatataaatgcggaggggagcaaaaagtaaaccctgtgaaggagaatagaagtatcagtgcaaaattctgattttagtaatacatatgtgtatgtatgtatgcatgtttatgttctcatgtattacgtatgtgtgtatgcatgggtatgtatatgcgtttttacttgcgtatagtttctgatctgccttgctgaaagggcccagaagcatacatacccagtagcaataagcacatctagtgttcagatcatcatcgctaataccatgtcccactaaaaggaactagggctccttgaagaaatggcttacccctaggctgggataggtaggcataggaggaccctggagcatcttgttgtggcagaaagtaaagaagtgcttatggaactcatggggcatgcctcaggagccaacttagagggccttccactggccaactctcagacaatttgagctccaaaataattacagtgatgaattttacttcattttatttatttatttatttatttatttatattttatttttttttgagacggagtctccctgtgtcacccaggctggagtccagtggtgtaatcttggctcactgcaacctccacctcccaggttcaagtgattcttgtgcctcagcctcctcagtagctgggaggttacaggtgtgcaccaccacactcggctaatttttgtatatttagtacagtctgagttttaccttgttggctaggctggtctcgaactaacctcaaacgatcagcctgccttggcctcccaaaattctggaattacaggtgtgtgagccactgtgcctggcctcagtacggtattgaattttacaccattgaaaaacaatacaaatttataagtccatactcataataaatagatagataagtgaatggggaaggctggttgataaatgtagagtcagtgctaaagtttgaatatcattttgcaaccatcatagtaaggatcaggcaagaatcatcaatggatgctaaatataaagaaaatgtttatgagaatcagtttatttgcatggtcttaagagtgtttaccctcaaactgcctgttagtacaagggagaataaaaagcattaactaaacagtggagaaaccgtatcatttgtattttaattgtaattgtataattgatgccctgttttgactgggagatcaaaattatcatcaccaatgagagacagatgggtatcatatacctccagatgtcataccctgagaaggccataacatcacctacgcaggattccagctgagaatgcaaatccgaatctaatcctgaggaaatatcagacagactcaaagcaagaaacattctattaaaaagggtgaagaagggggagtaattctttcaaaatatcaatgtgaaaagacaaaggtatggaaatgttccagattaaaagcagttaaagagatatgacacctgcatgcaatatctgaccctggacatgatcctgtgctgaacaggagaaaaaatattaatactgtaagggacattattgagatcagcaggcaaaactggaatatgaatggtagattagaccaatgttaaatgtattagcattgccaactatactatggctatataagagactatccctattcttaggaaatacttaagtatttaaggaagtggttcaggaagaaattagtgtataaagatacctgtctactcaccatctgtctatccaaaacctgtgttacaatacatacatacagacagacacacacatgcacggtgcgtgtgcagcagcagtggggaaggagagcccaagtgatcaagcaaatggagtaaattgtcacaatagatgcatctggataatggttatatgggtgttctttgttctgtttttctttgttccctttcaaacttttctacaaatttgaaattatttccagagtaaaagtatgaaacagtgacctactatgaaatttagaacagtggaccagattaaaaggttatttattagatgctttaaaagcactcaagataaagtgtaacatttaatcctgaggggaagaaaactccaactcttaaattaggaattgatagatattctcttatataattaaaggaaaaaactcttgactgtaaatttaataatgaaatgctagaacctaggttcataacatacatagatatctttctgtggtctgtaaacctctgaaattgtatgtaaacacaattttgcatacatttgggagggaaagacatacttttcgttaaactctaaagatgactcttatcccaaagtagcaaagaaaaattgtgctatgggacatttcctcctaaaacattattaagaaaataaagaatcttggaatgctgttatttaaaattgttccagatgcccttagtagtgtactcaaatatacaattatagataatggaaataaggcaagatgatcattatgtgtagatgatatgtttgattgacagtattctcgggatagattcttgaagtgaaattagtatatcaaaatccattgatatatttcaccaaattactttccaaaaagtaattccagtgctttgggaggctaaggcaggtggatcagttgaggtcaggagttcgagaccagcctgggcaacatggtggaacccgggtctctactaaaaattagaaattagccaggtgtggtggcacacgcctgtaatcccagctactcgggagacagaggcaaagttatcacttgaatttgagaggcggaggttgcaatgagctgagatcaagccactgctctccagcctgggtgacagagagagactctgtcttgaaataaattaattaattaattaaaacaaaagagataaataaatacagacatacataaaatgaatttgcactcctaccagaaatatatgagtgcctttctcccttcatccatgccagtattatagttgggcattgtgcctattcaaatgatatgattatttatctagaaacctccaaagaatctatcttttaaaaattatgtaagtcagtttcctttaatctggtaataaccagttagaaatataatgaaaggggaaatatccccttcccaatagccacagaaaacatcagtttcttggaaataatctgaacctgcaatatgtgagaattacatgaagaaaccaaattttactgagagaaagaaaatttgaataaataggcagtctgtgttccttaaagggaaggcttaatattgtgagaacattttaagcatattaattccatctaatttaatttataatttaaaacaactcttttcagaatcacaatgtgatttttttgaaaattggaaaatgtattctgaatattctgaatattacctggaaggataaacaagtgaggctagctaactttgtaaatggaaaagtaaagaaaaaattatcggcattagggttaataaaacattgtaaaactacaagtaaaccagtgtgtagacaaaacagaatgagttaaactcagactatactgttataaaaatataatgtatgttaaatgaagcatagcaaatcagtagagtcttctaatggttctacaataaccaagttagcgtttgggtgaggctgggaaagagaaaccctgacctcataccatatatgcaaacagattaatgagttgaatgtttttcaagagtcaaacaattaaaaagctagaagaaaatatgcttgatcagagaggtggaaattttttaagcataaaaagcaacaaaagaccataagaggtttaactaagagattgcaaacttctgtaggttaaaaatatgtcacaaataaaattaaaagacaaaggactaacagggaagcaaataagaaagtatatccttcttacatgaacagttcattaaaaaataaaacaaataggaccccagtgagataaataggtaagaaatgtgaacagtgaattcacaagagaaacgcagatggctaataaactacgagagcatatccagcctcacaggcaaattaaacaattatttgtcaactataaattagggacgttttgtttttgctctacactcaaattcagtactggcatgggtgaaatgagaaaagcattcctacactgctggtgacagtgtaaattgatgcattctggaaagtcatttggcagagttaatcagcagccttcgatccagtaatttaacttccaggaatctctcctaaggatattatcaaaaattgtccagagacatttatcatggcattaactataaaagcagaacattgctgtcatcccagtggtccactaatgggaaaatcatttaaaaaacattcatacaatcatggagatattttaaatgtttgcaaagacattttaatgatacccaaaactgaatacagtgtatcaaactattaataattattgcctctgagtcactaaaagagtgataatattttctgcttctttatattttgatttactttctgatttttcaggatgaaaatttgtcatttttatcatcaggaaaaattagtagcacacacactcttaaattgttttctctatatcaggccaaaaaaatggccttctgctctagcagctatttaattattacagaaatcctaaccgctgtgtatacatataaacaaaacttgtaatgttttctgtgagacacaatatagccttgactaagccataccagagttacctacaaggtggatcatttaaacccacatgggatctaacgctgctgggtgacctgtataaagtcatcttccataatggtgtggggctttgtgagaatgggtttttttacccctactttcctttttttaaaggcagggtaggcccaatttcctacactttaagcactctgggtctcacaggaagaagtttggagcaggtgatagttcagtgagatctaattttacacacacagtatgacttttctagtttcattttcatgtttttttactggatcttatatcttacagctttcggcaatacttcttccacctgtggctttccagttcctctcttctctttctcctttcttccctttctaaaattttccaaacatcttagctgtacaataaatgcaagagcgctttatagtaaatacatagcatccaggttttattatgctatctttttagagtgaaaatatactttcaatgtgtggccaaataggacattaatcacttaccaaaatgaaattgctacatgttgttgttgttgttgttgttgttgttatttgagatggtctcactctgtcacccagtctggagtgcagtggctcaatcacagctcactgcagcctcaacctccttgcctcaagcaatcctgccacctcagcctctgtgtaactgggactacaggtgtgcacccctatgcctggctaattttttgtattttttttttttttttgtggagatggggtttcaccgtgctgcccaggctggtcttgaactgagctcaagcaacctgtccaccatggcttcccaaagtgctgagattacaggcgtgaacaactgtgcctggcctattactatttttaaaacattttgttatgttattttctagaaacctcctagatactgtattaagtaatgcggttaactaagatttttatcagtcatacatcagccatccccagtctttttggcaccagggaccagtttcatggaagacaatttttccacaggggatgggaaagggatagtttcaggatgaaactgttccacttcagatcatcaggcattagattctcataaggagcacgcaaccttgatccctcccatgcacagttcaccatagggttcatgcttctatgagaatctaatgctgccgctgatctaacaggaggtggagctcaggctgtaatgcttgctcactcacctcctgctatgtggcctggtttctaacaggccacggactgatactggtccatggccccgggggttgggaactcctgttgtacaggacctagagaatagctagctaactagccaaagtttaaatccatgtatatttaagtttctgtgttgaagctgcacaggtgcctttgagctgtaaaaattaataataactaaatggtatgctttgtcttcctataggagttcatctttattatgttggaggggaggtgtatgccgaatgccttagtgacagtagcatctttgtgcaaagtcggaactgcaactaccatcatggatttcatcctactactgtttgcaagatccctagtgggtgtagtctgaaaatttttaacaaccaagaatttgctcagttattggcacagtctgtgaaccatggatttgagacagtctatgagcttacaaaaatgtgtactatacgtatgagctttgtgaaggtaagtgagctccgactcctccatttagggcctaacatacttttgctgtgctttttttttttttttttggcgatatatgaatctatatcctcttgataacatattatcatattagctgacttattatctaggcatttttaaactttaacaaaaatttcaattattaggaaaatatcattggaacataggagtacttgtattaaatatcaatagcagtaggttttactagccttttccttattcagatagcaccgctttagctattgtattaccagtagaatatgttatgttatatatttaacatataatttaaatacatggttgttttacgagatcagttgagtaagcatatcttccttccttttcattctttgttttttgtacttttatgatggtaatgcttgtttttgtttcaacagtaagcaagtgatctttttgtaaaaattaaagttcatcacattggaaattgtgtttggtcaggttttttttagtggtttcagtaagcttcatgattttcttacaattcagaagttaataaggcccttgcccaagataaatagatgccttagctcaaagattgcattgtaaggtttgatgagggaagaggttaaagacattgctcataataattgatctttttgctgtctcatgttctgcctctgagaaataaaaatttttaagatgccattgaaatcttaaaaaccttaaatgtctgattagatttctgagtcagtgacttttctagtaactgacctgtctctgaattctcaaaaataaatttcattctctcgtactttgagaaacagaactaattatatgtttgagtgaggcaattatcttttatgtcttctcttcagaagctcaccaaacttgttgttaaacctgttttgtaatgtatttattactgaggataattttggagccttacttgttaatcatcccttagatcaaagatatcttttcctgaatatagttacttttcctacttatttaaagcatcttagattttcagtgtgttcccttagtgtttgtttttgtgtgtttgtttgtttgtttgcttgtttgctttttgcagtatacttcaacagttatttgtagttgagtctggtaccttgttagtattaagaaaatttttttaccctttaaagaggttaacctatatgttatgtacatatgggactacaaagaactatcttattcattgttaacatgtgctgtttaatttttgacttagcatttggctcaaatgatttttaaaataagaacagtgacctgccagaagtgtttttgtttattgttttaattggtatggaggaaagaacagctcttgagagtcgagatgcggtttccagttttttctgccattttaactgtgtgattaaggcacagatttcttctctggttctcaggtttatcgtctttgaaatgggggtggatggagttgagaactgtggtaattattactgaggtccctcagtgagtctgttattgaaggaccactctaagagaatttattactttaatgttccaattagctttctgctcaaactcatttcttattgtttacccaatcaattttaattattttacttttgtagagttttaataatttacttttacacaagtaaaaacaacctttacactaataaaaggtatttataatgcaaagttatgcattcaaaatttattagatttcattcattcagcagatattttagcactatttcagagaagtaatacaaagatgaaaaagcacctaaagtctcttatcatcaagatccttatgccctagtatatctttaattataatctgataagcactagaatggagagttatacaagatataatgaacttagcctggaagttggatttggagagctgaaggtaaatattatttaaaaatcctgctgaatgttaaagaaaagttgtttatcatatgttagcaacaaaaaatttgcacactgtttttacaaaactgttctttattataaggactgcatactttgtcctctcccattcaacattttaaagaaattagaacattttactaacaatagccaatcttgtgctgtttttaaaatgatcatttttggatattaacataaaacacattttataaattatttgtactttaaattctatgtctgaaaattccaagtcagctcagctgaacacatatttatagagcttctgctttctgtcattatgctgtatattggaggtaaagataaattcctgccttcaaagatcttgctatctgatggaggaaacctgcacataagcctgtaaattaattttaggagtttgtttatatttacaaatgcatgagtgtacatacatctatgtagatatatatatatctacatagatgtagttcatacaagttctgatgttcagatatattttcttttttcttcttttttttcttttttcttaagacagtctcgctctgtcgcccaggctggagtgcaatggtgtgatctcggctcactgcaacctctgcctcccagcttcaagcaattctcctgcctcagcctcccaagcatgctgggattacaggcgtgtggccaccgcacccagctaatttctatatttttagtagagacagagttttgccatgttgtccaggctgatctcaaactcctgaccccaagtgatcacctgcctgagacagagtctctctctgtcaccgacgccagagtgcagtggcgtgatcttgactcacaacaacttccgcctcctggattcaagtgattctcatgcctgagcctcccaagtagcagggattacagggatacaccaccacacctcgttttagtagagacggggtttcaccattttggccaggctggtttcgaactcccgacctcaggtgatctgtccatctcggcctcccaaagtgctgggattacaggtgtgagccaccgcgcctggccccagatgtatttcttaaaactacgggagtagatagatagcagaaataaatagaacccaaccttctctgatattcctcatgaaacagtgattaaaggattaatcagaacttcacattcattgtccaccctcaccaatgagtttttgatctttgcagtagcagttacttttctctttttcatagtgactttattctatggaactgtattgtcttaatgcactaattctgccaagctaccttcttgtacaaatgaatgatagaatgtattgattcatggcaatggctaggtgtcaataatagctttttggatacttgaatgtactcctgcccgttttgctcagagattgaaagatcaagagctgtgtgttgatagggggaccttcagtggctgaatagggaagaaattgaatgtcattctgtctagcatagcttttttgttttattttcttgatgataaaatgagaatttaataatagctattacattactatcagtaatgggcaattaaaagttttaaagtgtctttattaagataactttataatgtattttaaaaccttcattcctcaagaccagcaattcttattggaatccatggatggaccctggggagctaacatccatcccttgaaattgcctgcgaaattatgcgtgcgtttgtgcatgtgtgtttttttctccccaggggcgggggggtcagggaggaaagatgcatagctttaatcagagtctttggttatgtgaactcttcttacttaataagtttaaccactgagttaaacaagttaaatgacctccagtatgtttttcctagggctggggagcagaataccaccgccaggatgttactagcaccccctgctggattgagatacatctgcacggccccctccagtggctggataaagttcttactcaaatgggttcacctcataatcctatttcatctgtatcttaaatggccccaggcatctgcctctggaaaactattgagccttgcatgtacttgaaggatggatgagtcagacacgattgagaactgacaaaggagccttgataatacttgacctctgtgaccaactgttggattcagaaatttaaacaaaaaaaaaaaaaaacacacacaccttggtaacatactgttgatatcaagaacctgtttagtttacattgtaacattctattgtaaaatcaactaaaattcagacttttagcaggactttgtgtacagttaaaggagagatggccaagccagggacaaattgtctattagaaaacggtcctaagagattctttggtgtttggcactttaaggtcatcgttgggcagaagtttagcattaatagttgttctgaaacgtgttttatcaggtttagagcccatgttgagtcttcttttcatgggttttcataatattttaaaactatttgtttagcgatggttttgttcgtttaagtaaaggttaatcttgatgatatacataataatctttctaaaattgtatgctgaccatacttgctgtcagaataatgctaggcatatgctttttgctaaatatgtatgtacagagtatttggaagttaagaattgattagactagtgaatttaggagtatttgaggtgggtggggggaagagggaaatgacaactgcaaatgtagactatactgtaaaaattcagtttgttgctttaaagaaacaaactgatacctgaattttgctgtgtttccattttttagagatttttatcatttttttctctctcggcattcttttttctcatactcttcaaaaagcagttctgcagctggttaattcatgtaactgtgagagcaaatgaataattcctgctattctgaaattgcctacatgtttcaataccagttatatggagtgcttgaatttaataagcagtttttacggagtttacagtacagaaataggctttaattttcaagtgaattttttgccaaacttagtaactctgttaaatatttggaggatttaaagaacatcccagtttgaattcatttcaaactttttaaatttttttgtactatgtttggttttattttccttctgttaatcttttgtattcacttatgctctcgtacattgagtacttttattccaaaactagtgggttttctctactggaaattttcaataaacctgtcattattgcttactttgattaaaaatttgtcatttcctttattcacctactagattttaggatcagtaaagtttgctactcttctgagaatttttttctcaaatatcctccaccaaacatgaatgaaattactaatacagagactcgaacacagcagcatgaagagaccggagccaatttaaatcaaaacaaaggacatgtacaccttgaaaaattgagaaaaactaccaaaatctaagtgtataaactttttaattttagaaattacagcagcagcactttttggttagtaccatgcagtcaaccaaagcagcaatttctaaacttcagatgaagatacaagcgtgactgtgggaggaggtaataaagggggagggatgagaactcacactgcagcaggagaagatgactacctttgcagtctacttaaggctgggatgatcccaacactacccattcccccacaaaaaagtttaccaatgagggacacagattgaaggacacttagattatttcttggcccaatagatgctattctttctcctttacatttttatgtgtctttcctggagtgtgtttatgagacctgaaatttaaggaccatccctttttaaacctagttttaaagaaaagaatgccttgctttttcacccccaaaatacatttattccctaaactatgaccaaggaaaaatttctactgctgctttttgtgtccaaaaaacatcatgatataattagagaacgccccagacagaggtcctacattataacacaaattcatgcacatctttgctgggtcacttaacttctgtgaatctctgtttcttcatttgtcaagtggaaataatatagttgtgccttgtcacaaaattgaggtgaagatgccttaaaaatgcatctgccatgcaagtatggggatcacttgaactctcccatacgctctattttccacttacctaagtcatttcaagctcagtcaatctagataatagtgactggtgagatataataaaagttgatattaaaattattaagcttaacagtgaagtaaagagataatgcaggctaggattcctcatccttttcctagtgaaaagccaattttgagttcccatggttgcctggtgggacagttaggcaagttgttagttgggtgtagcaatgctggtagccagcttgaagttctatcagataaaacaccaggatcatccagtaaattgaaatctcctggttggggacctgtggagtttgcaacatggtgcataagtaggtccctcatggttaagtgcaactctatgtatttttggtgaaatcttaggaagaccattgtcatcagccataggaggctattaagtctcttggaaaggtttaattaaaggaatggaaaaaatcaactattagaagtggagggccctagagctcttgcctcattcttgatttaatagtatttgacttccatcaagttttttagtttttctgcacctgtttccttatctgtaaaatggagacaataaagcctacctcctggggttatcatgaagtttaagccgatacatgcaaagcaattagaacctcttaataagtgttaatacagccagctaaatctggctgggaagacacctgaaaggaatttcattcaagagatgtttgatgaagacctacttacctttgaagtatttaataaacacagtggaagattttatctttgaggaactcagagtctagagagagaaacctggagaaagaaaactagcaatgcttgagtgcctagcctattgtgttccaggactctgcaagggattcccaaacattgtctgtcatcctcccaaggacatatgagatactactctgtccccaactccttataccatttttcttgctttttttttttttttttttttttctttttttttgagaaggagtttcgctcttgttgccctggctggggtacaatggcgcaacctcggctcaccacaacttccgcctcccgggttcaagtgattctcctgcctcagcctcccgtgtagctgggattacaggcatgcaccaccatgcctggctaattttgtatttttagtagagacgggatttctccatgttagtcaggctggtcttgaactcccgacctcaggtgatccgcccgcctcagcctcccaaagtgctgggattacaggcatgaaccactgcacttggcagtcatttttcttataaatgaggaaatttaactcagaagctaaataagttgcccaaagtcacctagctagttagtgtggaagagtttcaattcagatctgactttaaaatctagagttaattctattaaatactatattcttctttctcgtgagtttacagtcacatgtacttactataaaataaagtagaatgaagagcacagagggaagaagaagtagttcagacttggttggatggagatcagtggagtttttacagaggaagtggcatttaagattgagcttgaatgatgggaagcattttgataattggaggaacttgtgggcaggagaagactccaagacagatacctgttgtttgccatgccccagcatctaccccccaatttttaaagatgtgcctcccggcctcagggtgactgggatttatcatactgcatgacatatcccctctggctactgttgggaatctgctctttgggaattctggagctagaagtaaagtctctgcatggctgaagatacagtaaaccttaggcattgtcccctgtcatctcacctgctacatgggctggagacaagaaagaagagacagaaatctcagggcatccagtgtcctgggcctaggatttaccaagacctgccacatttctgttctttgctgtccttggatacaccagaatctgtacagatgcccccctcccctcgccttttgcttagtgtagtttcagttgggtttttgttccttagaagcaaatgaggattaagtaatacagtatgaaaatgtttgactttttaaaaaaagatcttttttaaatagatcattttcttttaaccaaaataatacttgttcatgaaagatttttaaagtatggaataaacaagcagagtcacgcagcggaagcgtaccaggcccataaagtacgggatgaacaaaaagaagaaacctaaaattacctgtattaacccatgataattgaattagtttatccttgcactaggtgatgataacctggcatagagatagcatgctataggaaatgcaagtctagaggttagttggattacttgcttagtaaaaagatgatgattgactccatttttaaagcagttattgagtactaatcctgtgttagccactgtattaggtgaaaaaagtgaataaatctcagcccagccctcaaggggcctgaactctaatgggaaagacagacaagtaaatagactgatggcacagtgccatgatagcaaggggcacagaacagtacataacccagacaggagtaaggggagacttctcagaggagtaatgcctcagaactgagtcttgctgtgataataggtattacacagcaaggaatggggaggaggaaatgtgtaccaggcagaaaataaggcaagactgttgggaacaaccagtaattctgcgtagctggggtgtaggacaattatatgcaatggtaagtaagagaatggagaggtaggaaggggccaagccattaagaatcttgtgtatgttctgctaagaaatgggatgtttcccaaggattttagctcctagggatctcaacccaaggatcaaacagaacaggagccaggagaaaaccaacagccaagcatacacataagggggagaaaggagctaacagagtgagaaataatcatagaagccaaggaaagcatttcaacaagcagggcttgatttacaagatagagaaggatggaatttagaagaactttacacttagtaactaggaagtctttgataaccttaaagttttgtaggagtgcggcataaagccagattacaagggactaaaaaaagtggaggaaagagtttcttcttttgtaaagatgaggtctcactatgttgcccaggctggtctcaaattcctaggctcaagtgatcctcccaccttggcctcccaaagtggtgagattacaggtgtgatccactgtgcccagctcaaaagcattttgattctagaaaagtttattgatgagaaggacacaaagaggatagaatgagttggctggagagatgagtagctatggagagaggctctgttagaacaaggagctatggacatgcctgttcaatgatgtctgcctcttggtgaggtcatccactcaaaggggattaagaccgggctgaagaacagaaaggtcggagcagccaactgtgatgagaggagtccactagtaataaagcaaagcactgccaagaagtatcaatatgcactgcagaggttgggtgatatgaccttgatgtggattcagtccacataatcatacaaagtctctggaatttggggaccaaatcagagaaaaagaatggtaaagtgcttagagttgaggatcggcaaagcagtcctggggaaattctgtcagactaatgaccatgattggaatgatggcctatgtggagcaggctaagaatcaaactaggaacaagaagccaaagggagttgctgggaagctgagatgacagcaaagcgtgcattcagtttgagtgtccgcagtcttcaatcattacttccccctagagaaatttgagaagacaagcatcttgaaattctcggagataataaatcctgaaccaaggccatttcacgagggttgctaatatgaaacagagttgcaaaagtcattggaggagaggaaaatcaaggaaccaagaagtaggctgagaggagcgaagtgtttttgctcctccttgcatcaccaggtagtgcctaactcacagtaggctttcagtaaagaatgaatgaatgatattgtctagtctcatagacatttgagttatctatggtgatacaggagacactgtgaatgttacagtggaattagggaaagggaggggcagagccaccgtagtgaagaaacaaaagttaaaccatcaacaatccagaacaagggtctgaaaaggaagataaatgagaaagaaaaccagggcaaatcagcaacatctgtcatcctgggatcagaatgatcttccacatgcttggcagaggcaggtattataccagagctcagtagacattcatcttctgtcttgtgtatcttttaaagattccctatacctgaggttttagaaggatttctgaagaatttctagctgagttcacagaggttgtggtactgttaaataaagtaggaactcaagaaaaacgaaagaagtgtggggtgaagaaaattaggttggtgaagcatactggctgagaattcccaggctcctgagagtctccttctttctcatatttcaggtatgaactagttgcttccccatatgttactatgtcagtaatatgcagaataagagcacatccagcaagtggaatgaatggaatgtagcgagaaggtcatagagagaatagcaggaaaggaatatggcgatggggatacaagatcttttcatctcagccagacctctcttcttcccaaagcacactgtatttctagccacaagtgaaacaatagtgaatctctgaaaagctcattgtctattgccaactctagggaccataagcataggacatttggtatttcctgggctgatataatataatcatttagaacagtaggtatttcttaaaagaatgtttcattttatgcctgcatttttgtgtactaccaggacttattaaaaagaaataatctgctgagtgtcttaaaagtgtgccaaatttggccaggcatagtggctcatgcctataatcccagtacctgtaacccagggcaggtggatcatttgaggccaggagttcaagaccagcttggccaacatggtgagaccctgtctctactaaaaaaaaaattagctgagcgtggtggtgcatgcctgcaatcccagctacttgggaggctgaagcaggagaattgcttgaacccaggaggcagaggttgcagtgagctgagattgcgccactgcactccagcctgggtgacacagcaagactcagtccaaaaaaaagaaaagaaaagaaaagagccagattcaggtttcacccaacataaaagatgagctgtaggccacaatattaattgttacatatacaagtgtttgtttttactttttctgggataattgggattgcacaaattgtaggcaatttactgaaaagtctactttttattgtgtctggtaaccgtgtaccatgtgtagtttcataattcttaagtggtttcaaaagcaatggctccccagagagtgctgtagggaaacctcaggcctgcagttttcaagcactggaactgtaaaaccacctcaacagatctggaagctcagtgtttgcaactgaaaggccatgatctattcagactaaatgttggctgataattaaaaggcagggaatttccatatttaaaacttgaggagagatggcgagatggctgactagacacagccaggaggaatatctgccaccgagaaaccaggacattgggaagactggcatatttctaacagatcttcagaaggaaggcattgagagtggatgttgagaagacacagatgctgggctaaagggggaggaagctgggaaccctgcacggggccaccgcacactgggacttggtcctagcccccagtgactcctggggaaagggtgagttgaacaggcaaggagcaacccactctcaccatagacctccagaatcctgacagcaggagactccatgaccaccatggccacttgaattgacaaggagagctgctcagagaagtggtgggggcagaactccagctggtgcagagcccagagggttttgtgcagaagtacatatagtggagcatagccagggatgcccatgaccataggctctgctcactcccacaggggactttagctccaatagaactgtcaggcctgaactctgcagggtgatcctgcccataagatggggccagcctgacctgagcacctctcagtctagtggcctctcctggtaccccagcctggccatgcccacttgcagtgcagcctcaggtgcccagggaggatacctcctgggggcccacatcatggttcctgtgctggcagaccatgcctgactggaagacagctccagtgggagcagagcagctccagcccattcacaccctttcctcactgcagcctcccctgcgctgatttgcctgcacgcattcacacacagccacccccaacatcactacgccagtgcatgtgtgcatcagcagaccttgcttccttttccccaccagcaggcatgtgcgtgtgcaccctgtcatgccactgctgctggcatgagtgcacgctgcccctttcccccaccacactgccactgctgtcaagtgttggcagacacagagtctgccagccatgaccccaccagtgcctcatccctgcactgtcattgccactggtgcaaaactaggcacagaaaacagtggatgtgcccccaccctaagtagccaccactgctggtgtgaatgtgcgcagaaggcacatagtcttgtgcccaacagtgccctgcccccatgctaacaccaccactggcaggaatgtatgcacagtcaccggcagaatccctcacgtcccccacaccagcacctctcagccatgctgccaccactgctgttgcaaatgcccacacagagacagacaccttggtatccattagcaaccttctgcagccaatgagtgtgcaccccgccatgctgctgctgctgctgctgctgctgctgctggcttgtgcaaacaaggatagatcccactgctagtgccctacaaagtgctttggctggcactacccattggagtgttgtgactagcttgtgactagcagccgaagaatacatcagccactccagtgcagcaggtttccaacctcaaggagccagagaacaaagccaggacccaataccagtcccccagagttacagcatgcagtctaggagtcctgagctgaggcctggctccctaaaatcttccagaaatgaagccagtcaaatgaatccaccttataccacaatcaaacccccaaggtcattaaataggataaataaaataaaataaaaaccataaaataaataataaaataataaataaaaaaataaaataaagaccatccaaaggacagcaactttaaatactgaaggactatcatcccacaaagatgagaaagaaacagcacaagaactctgacaattcaaaaagccagagtgccttttttcctcaaatgattgcgctagttctctagcaagggttctcaacttggctgagatggctgaaatgacagagatagaattcagatgatggataggaacaaagatgattgagattcaggaaaacattgaaacccaattgaaggatgccaagaatcacaacaaaatgatacaggagctgacagacaaaatggcctgtacagaaaagaatgtaaccaacccaagagagctggaaaaacacactacaagaatttcataacgcaatctcaagtattcacagcagaatagatcaagatgaaagatgaaagaatctcagagcttgaagactggctttctgaaataagacagacaagaataaagaaagaatgaaaataaacaaaatctccgagaaacatggaattatgcaaaaagacaaaatctatgattcattggcatcactgaaagagatgcagagaatggaagcaacttagaaaacatatttcaggatatcatctatgagaaattcctcaacctagctagagaggccaacattcaaatacaagaaatgc

SEQ ID NO: 2126 - DNA, 1812 bp, Homo sapiens
ccggccgcgctgcgctcacgccggccgggccgggaatttggagaggatccctggtcgcgcggcagcggcggcggcgcgcgggtgagcgggtgctgactgggttacttttttaaacactaggaatggtaatttctactcttctggacttcaaactaagaagttaaagagacttctctgtaaataaacaaatctcttctgctgtccttttgcatttggagacagctttatttcaccatatccaaggagtataactagtgctgtcattatgaatgtgacaagtttattttcctttacaagtccagctgtgaagagacttcttgggtggaaacagggcgatgaagaagaaaaatgggcagagaaagctgttgatgctttggtgaaaaaactgaagaaaaagaaaggtgccatggaggaactggaaaaggccttgagctgcccagggcaaccgagtaactgtgtcaccattccccgctctctggatggcaggctgcaagtctcccaccggaagggactgcctcatgtcatttactgccgtgtgtggcgctggcccgatcttcagagccaccatgaactaaaaccactggaatgctgtgagtttccttttggttccaagcagaaggaggtctgcatcaatccctaccactataagagagtagaaagccctgtacttcctcctgtgctggttccaagacacagcgaatataatcctcagcacagcctcttagctcagttccgtaacttaggacaaaatgagcctcacatgccactcaacgccacttttccagattctttccagcaacccaacagccacccgtttcctcactctcccaatagcagttacccaaactctcctgggagcagcagcagcacctaccctcactctcccaccagctcagacccaggaagccctttccagatgccagctgatacgcccccacctgcttacctgcctcctgaagaccccatgacccaggatggctctcagccgatggacacaaacatgatggcgcctcccctgccctcagaaatcaacagaggagatgttcaggcggttgcttatgaggaaccaaaacactggtgctctattgtctactatgagctcaacaatcgtgtgggtgaagcgttccatgcctcctccacaagtgtgttggtggatggtttcactgatccttccaacaataagaaccgtttctgccttgggctgctctccaatgttaaccggaattccactattgaaaacaccaggcggcatattggaaaaggagttcatctttattatgttggaggggaggtgtatgccgaatgccttagtgacagtagcatctttgtgcaaagtcggaactgcaactaccatcatggatttcatcctactactgtttgcaagatccctagtgggtgtagtctgaaaatttttaacaaccaagaatttgctcagttattggcacagtctgtgaaccatggatttgagacagtctatgagcttacaaaaatgtgtactatacgtatgagctttgtgaagggctggggagcagaataccaccgccaggatgttactagcaccccctgctggattgagatacatctgcacggccccctccagtggctggataaagttcttactcaaatgggttcacctcataatcctatttcatctgtatcttaaatggccccaggcatctgcctctggaaaactattgagccttgcatgtacttgaaggatggatgagtcagacacgattgagaactgacaaaggagccttgataatacttgacctctgtgaccaactgttggattcagaaatttaaacaaaa

SEQ ID NO: 2127 - protein, 465 aa, Homo sapiens
MNVTSLFSFTSPAVKRLLGWKQGDEEEKWAEKAVDALVKKLKKKKGAMEELEKALSCPGQPSNCVTIPRSLDGRLQVSHRKGLPHVIYCRVWRWPDLQSHHELKPLECCEFPFGSKQKEVCINPYHYKRVESPVLPPVLVPRHSEYNPQHSLLAQFRNLGQNEPHMPLNATFPDSFQQPNSHPFPHSPNSSYPNSPGSSSSTYPHSPTSSDPGSPFQMPADTPPPAYLPPEDPMTQDGSQPMDTNMMAPPLPSEINRGDVQAVAYEEPKHWCSIVYYELNNRVGEAFHASSTSVLVDGFTDPSNNKNRFCLGLLSNVNRNSTIENTRRHIGKGVHLYYVGGEVYAECLSDSSIFVQSRNCNYHHGFHPTTVCKIPSGCSLKIFNNQEFAQLLAQSVNHGFETVYELTKMCTIRMSFVKGWGAEYHRQDVTSTPCWIEIHLHGPLQWLDKVLTQMGSPHNPISSVS

SEQ ID NO: 2128 - DNA, 2156 bp, Homo sapiens
atgatataaattatgcatagattccctggaaagccctcaaaagtctgctaaattcctgttgccaccaaatattgtttctttggggaaatatattctgattcctaacaaccaacaataatcataagttttaaatctctcctctctcctctcatgcagtttatgaaacgggctgcttttctgtttgtagctgaggccacaggagctggagggattgcaaagacctttattagagcatccatctggtgaccctggcagggaaacttaggatctaaccctaggatctggctagggctctgtaactgactgttagccagccctgcctctccaggataattatatttatagtggctttgcctcaggaggtttctggaggttgatgaccatgccaattattaactccttagcttcctaatgtagaacatttaggagtgacaggagttgttttctttgcttctcaacaggtgcctacctattgggccgcctttgtaccttgagttttcagttagcaaaatgtgaattgtatgaactaattcttccttgacctcacaggtggtggtaaggattcttgaaaagtgggtaagatccttagaaaaaagatgttcataaagtgtgactcctaggacaggatacaagataaattctgtcccacaaagcacctcatattttgtataattaactatcttcatggcatttgcattttctacagttcactgattttacctcttcagctttatttactatgctgcttttttgtgttaaagtgaattagtgtgtcagcttaaaacacttgtggtgaataattcatatcattcaataagcattaactcttaaatgtgaagtcttatcagccagggctgtgaaatataattgtcaatggtgataaacaattatgctttggtttttagtgaatgaaaaaattaagaatgagggaaccttaacatttttaacctaaaagattgtattttgccaactttccttgggcaatttgtgaatactgcaaatctcaggcatatgtcatcagtgattctaaagggattgtatttgttcctgcatttgttcttgagggtaaaatagcttttcatttgaatgatgcttttgagttggcagcaggacagggatcagataatttgttgttgtttacagattatgttttactttattgtgatgtaattatagatcataattctcatgtttgtccttctcttttttcccttcctttttctagtacttcctcctgtgctggttccaagacacagcgaatataatcctcagcacagcctcttagctcagttccgtaacttaggacaaaatgagcctcacatgccactcaacgccacttttccagattctttccagcaacccaacagccacccgtttcctcactctcccaatagcagttacccaaactctcctgggagcagcagcagcacctaccctcactctcccaccagctcagacccaggaagccctttccagatgccaggtaggttggaatgttcagtgatgttctgtagtcatatcagacagtgttatcacagtgtcacggaaaagctgggtcaacctgcagtggagggaggttttcagccctggtatatgacatagtgctctcgcacttttaggatacaacttttggtgaaaggagacctcatagtcaagtaagcaaatgtcttattttatttgtcaggcacagatgcttgaataagctatattttccccttgtttttaaaaggttttgaaacagctgcatccttctgggagtggcataattgttacagtctttactcttgataaaaagaaaaataccgtgttacacacatttgctcttatgagaacacaacctcaatcagcatcgttttcatacatggaaaaaactcctgttgcaagtgcaacctcagaaaaaatatttcctgagggatcccaccccctacttaattaaattcattcaaatgatgatgtaatcccaagaaacgtatactttaacaacaaaggaattacaacagaagtactggaaaccatctgcttgttcaacttagcaaagacaaaaaacaattatcctctttttctagacataactgttggtgtaatggttatcaaaataaatgattaataaggacattatatatttttaagttacaggttaatgagcaagcatctcc

SEQ ID NO: 2129 - protein, 137 aa, Homo sapiens
MFVLLFFPFLFLVLPPVLVPRHSEYNPQHSLLAQFRNLGQNEPHMPLNATFPDSFQQPNSHPFPHSPNSSYPNSPGSSSSTYPHSPTSSDPGSPFQMPGRLECSVMFCSHIRQCYHSVTEKLGQPAVEGGFQPWYMT

SEQ ID NO: 2130 - DNA, 2006 bp, Homo sapiens
agcgtgtgagcgggcgggcgggcaggcgagtgcgccgggtattggcagctgaggagtggaggctgggcagctccgactccctgacgccagcgcgaccagatcaatccaggctccaggagaaagcaggcgggcgggcggagaaaggagaggccgagcggctcaacccgggccgaggctcggggagcggagagtggcgcagcgcccggccgtccggacccgggccgcgagaccccgctcgcccggccactcgtgctcccacacggacgggcgcgccgccaacccggtgctgactgggttacttttttaaacactaggaatggtaatttctactcttctggacttcaaactaagaagttaaagagacttctctgtaaataaacaaatctcttctgctgtccttttgcatttggagacagctttatttcaccatatccaaggagtataactagtgctgtcattatgaatgtgacaagtttattttcctttacaagtccagctgtgaagagacttcttgggtggaaacagggcgatgaagaagaaaaatgggcagagaaagctgttgatgctttggtgaaaaaactgaagaaaaagaaaggtgccatggaggaactggaaaaggccttgagctgcccagggcaaccgagtaactgtgtcaccattccccgctctctggatggcaggctgcaagtctcccaccggaagggactgcctcatgtcatttactgccgtgtgtggcgctggcccgatcttcagagccaccatgaactaaaaccactggaatgctgtgagtttccttttggttccaagcagaaggaggtctgcatcaatccctaccactataagagagtagaaagccctgtacttcctcctgtgctggttccaagacacagcgaatataatcctcagcacagcctcttagctcagttccgtaacttaggacaaaatgagcctcacatgccactcaacgccacttttccagattctttccagcaacccaacagccacccgtttcctcactctcccaatagcagttacccaaactctcctgggagcagcagcagcacctaccctcactctcccaccagctcagacccaggaagccctttccagatgccagctgatacgcccccacctgcttacctgcctcctgaagaccccatgacccaggatggctctcagccgatggacacaaacatgatggcgcctcccctgccctcagaaatcaacagaggagatgttcaggcggttgcttatgaggaaccaaaacactggtgctctattgtctactatgagctcaacaatcgtgtgggtgaagcgttccatgcctcctccacaagtgtgttggtggatggtttcactgatccttccaacaataagaaccgtttctgccttgggctgctctccaatgttaaccggaattccactattgaaaacaccaggcggcatattggaaaaggagttcatctttattatgttggaggggaggtgtatgccgaatgccttagtgacagtagcatctttgtgcaaagtcggaactgcaactaccatcatggatttcatcctactactgtttgcaagatccctagtgggtgtagtctgaaaatttttaacaaccaagaatttgctcagttattggcacagtctgtgaaccatggatttgagacagtctatgagcttacaaaaatgtgtactatacgtatgagctttgtgaagggctggggagcagaataccaccgccaggatgttactagcaccccctgctggattgagatacatctgcacggccccctccagtggctggataaagttcttactcaaatgggttcacctcataatcctatttcatctgtatcttaaatggccccaggcatctgcctctggaaaactattgagccttgcatgtacttgaaggatggatgagtcagacacgattgagaactgacaaaggagccttgataatacttgacctctgtgaccaactgttggattcagaaatttaaacaaaa

SEQ ID NO: 2131 - protein, 465 aa, Homo sapiens; identical to SEQ ID NO: 2127

SEQ ID NO: 2132 - DNA, 136421 bp, Mus musculus
  misc_feature (1)...(136421): n = A, C, G or T/U
aggtgtcccattgcaggaatagaaaccttaactgagacaacctgtcagtgaattgggatagatcttgggcattatcttctcaaatatatatttgatgtatacctcccttgcctcaggagactccagttacacatggactagctgctggggtggtctcatttccattaatgctatgttcaattttttttcatagttcatgtatctaatagtatttttgttttgtctgccaccacaggttttatgttgagaggtttgattggggtctttgtaacgtaattttccttattttctcttcaacatgatgtcattcctagaccttcctgaacgtgggatgtagcatacatttttgcaatgttaagaagtgaacctaagccgggcatggtggcacacgcctttaatcccagcacttgggaggcaaaggcaggcggatttttgagttcgaggccagcctggtctacagtgtgagttctaggacagccagggctacacagagaaaccctgtctcaaaaaaaaaaaaatagtgaacctagggcctaatacatgttaggcaagtgttgtatcatgaagcaacacacccagaccataacaacccttctaatgtttttgtccaataatttttatatcaaatgtgtcacttctattgatctttatatactgggcattaccatatagctcaggctagccttgaactcactgtttagtcttggttggcctcaaagtcatggtcctcctgcagtgagcttccagagtgctggcacaataggcacactccacaatcaactttcttagttggtcccaaatgaattttctcctcattttgggtcatatttacctggttgtcatttctgaatggatatttgtattagctgcttgtcttgttgctgagaaaacccacttaagcgttggaagggtttctttcggctcatgttgcaggggacacagcccatgatgtcagggaaggcactgcagcaggagcaaacgtcagctggtcacattgtgtgcacagtcaggaagggtagagacgcttgtgcctcaggacctcagcacaatggcatgtttccacctatatttagggggggtctttccacctcaattgacctactttaggtaatctctcacagcaatataagagatttgtcttctgcatgattctgtactctgtcaaattggcaatattagccctcacagtattagacactgtacattttattttgctggatctttcagggttgtctcctataaatatgtgaacaaatatattcatacatattcacttagaaataagttaaacccttaggatgctatcactaaattctcttaggtaggaccacagcttacctagctatgtctatttttacatcactattgagtcaacatccattcagagaactttagaatgtcctttaaattctgaagaactattcacattttcaactacatgttctctggtaatcttgaatcctctcttcctttctggtgttttgttcctagcacagtgaattttccctctctctcccctctagcccttgtcttctgctgaacactattcaactgacaaagagaggggtcactgaaaaggggctctccagagccctctctgtggttatttcctgtcaggcaatctatcttcagcctccttgagcctgaaattccatttcctcagcccttttaagcttcttggctttttttttggggggggggttgggttttttcgagacaggatttctctgtgtagccctggctgttctggaactcactctgtagaccaggctggcctcaaactcagaaatccgcccccctctgcctcccaagtgctgggactaaaggtgtgagccaccactgcctggcagcttcttgtgttgtcctctagattgtcaacggaagcaggaagctgagagcttccctgtgttctccctggtttatgtgactgtctttcatggcctcatacccattgtcatcaaaagtatttgttcatgcatgtggcccttcaaaagctgcttcagtcaggttctttttcctctacctctgatggaagcagaagttttgggtggcctacaaatctttattgcagaagaactttgtatattccagatgcagtggggcaggtgtgttgccacacacctgaaacctcaccagttgggagatggggacaaaagggtcatgacttcaagctcatttttgattgagcttgaggctacataagacctggactgtcaagctgactcgaccggagtgcgtggcacagtctcaaaagacagacagacagacagactgactgacagacagactggaagagagagaaaaaagaaaaacaaagaaaacaaagcacctaaacaaatggatttgaagacgtggttcagtggttaaaagcacacattgatctttctgagaacctgaattcagttccagtaccaacatccagaaggtcatagctgactgcaagtccagttctatgggagctgacatcctcttttggcctcctgtgtcacctgcagttacatgcacatgtaaccacacacatacatatgattaaaaataagtctttaaaaaaatgtaagctctttgataaatatttaaaatatctaatctgtgatgtttgcagtctcttaaaaattggtgtgtatgtgtatgtatatatgtgtgtatatgtgtatgtctgtgtgtgtatatatatatatatgtatatacatatatatatgtgtgtgtgtattgtgtgtatgnnnnnnnnnnnnnnnnnnnnctgccagggtctggcttttcacttcagttcaaggggctcaattctgttgtcaggcttacatatcaaatgattttacacatgtccacctttccagcccagtgtttcactctgttttcttctctctctctttagattatgtatttgtgtgtatagtgtgtatagtatatgcgtgcatgtggcagcaagcatctttagccactgagccctctctcccgctctgttctgcaccctcatagagatggatcttagacaggcatgcctgtaaccctagcacttgagaagcagaagtatcaggattgctgaaagttccaggttagcctggtctacacagcaaatttcagacttgccaggagtacaatggcaaactcactcagaaaataaaaataaacaaataaataataaccacaaatttaattttttttttttaccaagagactttttcaattttaacatgtctaacatatcactttaaaatttcaggggtccattttttctgtatctgtttatctttttcaaagtttaagagagagttttaaaaaaatcttttaatttcatttcccccattttctgaaactaaactttttgctacacgtgtgtgcatgtgtgtgtgtgtctgtctgtatccacaagtgtcatgatgtgtatgtaaccatcagaggacaatggagagagtcggcacactcccggtatcacgcagacccctaggatggagctcaaatcatcaggcttggtggcagacacccttccccactgagctctctcattagccctccattttacttctttgtgacactggtaaccagcaggaggagtcttgtagatgccaagtaagcactaccattgagctccacggccctggcctcaacgtcagttctcatacctacagtctaccgttgtgtttttgtcattgaggtttgtctgtatcataagatgacgtcatgaaccgtatctttcctgtatgattgtctcgttggtccaacgtcatttcctggaaagctgttacctcactgtcacctgtgacatgctttcttacatacagtgtttactgtgttgacaaataacactgatctgaaacagtcatttaataacactgagactaaatgaaatcggggcccaataaacatttttgactgtatagaatagaattgcctatccaaaacgggaatgtagtgtgggcttaatgtggcgttatttccatggcacatggctatagtatagttacgtgtgatttctttcatgccataatcaccaaagattctatttatgtttccaaagaagacctcatttgtcccagttaggtacctaaagtctgaactattaggttagaaagaaaagtagacaggcaggcaggggtgccatatatgcttacacttatcatatctcataatagttgtatttaaaatattcaagagcaagtaatgttttatttccttgtttaaaagatcatcttcctactatgtatacattttatttcaagaatgcattttttttttttttgctgggtgtggtggtgcactttagctccagaattaaggaggcaaaggcaggcagatctccgagaggctggggccagcctggtcaacataaccttttctgttgctgtgataaaactcatggtcaaggcaacataagagcttgttctgatctatgacttctgagagattaagtttacggtagtagagctgaggtatggtgtgagacccgacttaaagcatttctccctgaaaggtaaagcccctggacgttccccaagcttgttttccctgatctctaacaatacagccagaaagaagctctttattctctatagccagcaaaaagcctttttgtttctgtgccttacagccagagatgcgatgattgtggggagacctacctagccaggcgcttgcttggctccctgtgccaaggactcagagatagagtccacagaggagaactgtagccaaactcctcccaactcctcccaattcctcagctagctgttaaaagcccctactgttagcgctcagggtcaaactcccctgcccttcttggtgaaagaagttcatcctcagctagctgacaataaagcttcttgcagtttgcatcaggtgtggttttctctcaagttattggggtgccggctagctcatcccgggacttgagcagaggtctccccagtttcagggggtcttacaatggcaagaggcaaacaaggcagtaggcacaggggctgagagagcaacaaacagagagggcagactggaaatggccagaggatttcatctcaaagcctgcctctagtgacttacttcctgtagcaaggccacgcctcctaaacctcctcaaacagaacactaactgctgaccaagtattcagcatagtccccaagactatggggacatttctcattcaaaccaacacacacacacacactttttaataaagaaagaaaagagatggaccctggaattacctcagtgacacttgcctatcccacataaaactctggatcaacccctagcaacagagagaggggataattgcagagagcaggctagatcaagcaagagggtaagtgggcttgcagggatctgagattcatctgtgtctctcaaaaatccacatgctgaaagctgtgtccactaggacgatggtcccagccttcaggaggccaccaattaatgctttataaaggcacctgagggagtttggccacctttgccatctcatgaagtcactgaaggcacgtcctatgaggaatcagccctcattggagaccagacctgctggctccatggtcttggatttcctggtgtctaaaatgtgaattcctagtgcttacaaattgtccagtctgatgcatttctttgtaacagccgcaatggactggaacaccaggagacatctacaaaactgatgaggcttttgcacaaggctggattcctgcacaagggaagggtagcgtgtacaagttgagagggaatgccaaggtgtaagtaggaagtttatgcatgagaagaatctagatgccatctggaaatcttagaaagaaggctacagtaatttctcgatgacttatttcctcattgtaaatacatacgcatactaattgtatttggataccttcttttcctttctttttgaggcagggtctcctgtattccaggccagcattgaaccccatcccccacccatgaacttctgatctttctgcatctatctctcaatgccagataccaggtatgtacttctacactactactactactactactactgctgctactacaccgctgccgatgcctgtttttaatgtgatgctggtgatcacacctagggcttcatgcatgacagtcaaacagcctactagctgagctgcatccctaactacactttttctttcaaaggactctctgtgctgtctaaactttagatcccatcgtagaaggatctaagaggtaggaaaggatctgaaatcactcactgaacattctagaatgctgtctgtaactcatcattgggtggggaaaactgcacagctaggttctactggaattggtctcttgtgaggtatgagcatactgtcaaagccatggaccacagcttagagaagtgagcatgaagaataaaagggatgtctgatgttctacaaaaaagtcagacatatccatagactggaaaagccatctagaaacaagagtgatgtcatatggtgacttggaaaatcaggcaggagatgtgcagttaaagttggaagctggagtaacactacctactcagagttgactgatgtgatgctagggccatatgctttaaggaagaggtctaaattcagaaagattctcaaattgggcttggtggtgctccctagtgatcccagctccaatgaggcaaaggctggaggatcaaaagcgcaaggccatccaagataaggctagcagaggattcataagaacaagtctcaagacaaaacaaaacaccctccaagcaggcacctgcgttcctctctggctgcctcggggttctcacccagggttaatgctgtgctcactctctttgttgccgaatgtatccagttcttttctagctcctagcagccccagcacctgtggatctacattgtctgtggcttctccaagctgtatgctgcacctatgggtcctgagagttctgtgtgaagtctttagctcaaaggagtcaatctcaacctactccccctcccctcttgaagggtgaattctccaacatatgcctaaatatttatatatttttcttccataaaatgtatcaactaaattatagacatttggaggttaattacctgtaatatttttttctttccaagatagaggaggagagaacgtgtctacccttcctcactatggtattccagtatcagacattctgtaaacatttgctgtggaataaaactcagcctatttatatataatagcatttcccagaatgccaattatttacttatttattcatttattttttttggagaggttctcatactgcctcagccatctacatgctaagatcagaagcatgcgccatcacactgcaaatcttataatgcacatacataaatatgattcaatacatgatgtgaaagtggtataatttaaatataatatataattttttatataataatgtgtggtggtttaaatatgtatagtccccatagactcatgtgtttgaatgcttagtccataaggagtggcactattaggaggcgtggccttgttggaggaagtatgtgcgtgtttggagcgggagggctttgaaatttcctatgttcaagctatgcctggtgtgtcactcagtctccttttgctgcttgtgcaatatgtggaggcatatctcatgggctcaagcataaatcttaggcaatacttttaaaaattattcattttatgtgtatgtgtgttttgcttacatgtatgcctgtgatccatgtgcatgcctgatacctatggagactggaaaaggatagctgaccttctgggaccatagaggtttaagagtaaaatccagattctctgcaagagcagccagtgttcttcacccagagccatttgccaggtcttaatgcaacactttaaattcatcttcttttttggagattggttcttatactctatcaagcttaggctgacctagaactcacaataatcctcctgcctcagtttcccaagtgctggggttgcaggtgtaagtttctaactgcaggtgtagatttttgtatatagaaatggaataagtgaaacttatttgggaaaaaagctctatttgaaattccaaaagttaaataatacaagatagattacacttttccatttcaaaagcactttatggcaaaaataaagggcactgtctcttcttatatgcaagggcttttgtcttattattaacttagcacctacttttcttttctttctttaatttcttcactcctgcctccatgtctctctctagtctttctttccctccccctaccctacctaccttggcaggcctgggattacaggggttctgccaggcagggctcccagcaccttttcctctttacgacccccaaggtttcagactcagaacacacatttattaggagagccccaaactcatgcttctcagaaatgcttgtttatctatttgtattttcacacaaactccctttttgagacagggcctctttatgtagtcctggtcgccttagaactcactttgtggacaaaactggccttaaactcacagaaatctgcctgcctcggcctcccaagcgctggaattaaagacatgcatcaccatgcccaactctttaaaatttttgtctgattatattgccttctaaaatttgttccaaggctttgtttcaaacacacccgtaaagaagagtctgttacaagactgtgtcaaactcagcccagatataataactgtaaaacacacaaaaaggcaaatagaattagggtacccagaatgatttcttttcctgtccaacatcctagcgcaggttttaaacaaacacaacgccaactggaacagcccatgagtggaagtagtgtgagactttatcctgtcttagagatacacgcagctgaacgctttgtggaggctaagcggtagcatcactcggtagaacagctcctgggtcaggccctaggcacccaggaggtcccccacccccttggtctctgggtgcacagtgagggtcctagcgcgctcctggtccgggagacgcagtccttcagtctctcgagcagccaggacccgcttgagtgagttctcctcctggctgggttattttttcagactgtcaagtagggaaatccttccgaaaactctggatcgcgaaggcacagccgagtacaaactcctgaccctgggggttgtcaagatggcaaactcagtcggagcaggcgagagtgcccggcactcccgctctcacactggggtggcgctgcgttcccggagaccgccgccttccatagcgcgcgggcccggggcggcggggcggcgaggaccccagcgcgcctgctgactacagatcccagggtgcctctgccatctcgctccctcccagcgccggccccgcctccccagcccttgttgttttggctggaagcgctccggaggagtttcagagaaagtctgggctgaagctagaggcgaccgatcgtgggaaggggaggcagaaaggctaggaggaggagggccggggcccaggccgcgccttcccgaacccgccgcgcgcccccgnnnnnnnnnnnnnnnnnnnnnnnnnnnnnnnnnnnnnnnnnnnnnnnnnnnnnnnnnnnnnnnnnnnnnnnnnnnnnnnnnnnnnnnnnnnnnngtccctgtgctgatccccgccctcatccgaggctggagcgcagacccaccctcccaccgcggacccgcgacctccccgacgcccggcgacgccctgaccctcgctgctggtccgcgaactccctaggctgatcaggacctgcccctgtgccggctgccacccggacgccgcacgccttcccaggcgcccttttccgagcagagggaaagagaagatcgagcccctctcagtgtgaatgcgccaacgggcggagcggagcggagcggacaccgcgcgcgggcattgtgtgtgcgcgtgcagcgtggggtccgcagcggggagcacccgcgggaggtcccgtttccaaggggcggagcgcagggcttccagttctgggctccctgtccggacagagtcccagcggagcccgaccgctgcctaggcggcgggacggcgcgcctggcggccaggagggcgcactgaaagaaggtcggcgagccctggtccccgcggttcccgattgagttcctcttcagtccgcgaatctgcgggagaggttcgatcgccgacacagggcgcggggagccgggccgccccgtcgggggaatctgagacgtcctctgggctgcgtttgaccgccgtgcccgccgtgcacggagcgcgtccactgtgtccaccgacccctttggtgtctggtcctcgagtcctcacggcgtgcaccatgagcggcggcgaagtggtttgctcgggatggctccgcaagtcgcccccggagaagaagttgaagcgttatgtaagtacaggtcagggcaccgtcggccccgctgcagcagcctgcgcgcccggttggctcttccacgaatcccgccctccttttcctcgatccgtctctcggccggcgggctccggaccgggtgcggtccactcccaccctgacgtccactcggcggccaaactttctccctccatattgcagactgcctcccttgtaggcctcgttgcctgttagagaagcccagttttccagctcaaaactggctgcatactttggttgttgttatttccatttagcaagggtggagtgaaacggggagaaagagccttcttttattatctgtatcagattctcatggatctgttaaatctcccctccccgagaaaccgcggaggtagtaagtactcatgggttctcgattgggtccgcgcccgctctctttgcgcctccaggaggtggagggaagtgaactgtggacgcaagacgtggataatataggcaaacttctcaaaatattcgctcaagggaaaggggaaaaaagttcttatgaaccctgccgtctgcttagcattttcatggttttgctttgaggacactggattttggccggagaaccctggcggtttgattcggcaggagggcgctggggggagcctggtggctggtgtttgggcgccttagaagcgctgtcaagccccgcaggaggggacagctgaagccaacagggatttcttgatgctggcgtttcttttcccgggcaccagaacggcttaactggtatttgcgtaattgattcaagatgctgattgtgagatgactgtgttcacggttaggaaaactgtatcttgaaggagcctataatacttgagtggaactatatcctcatcgggaatctagggtcctaagtcttccttcagatcggctaattttgcgatgtaccctgtcagtaaggaaatgacactttgtcccggcatttgaaacaagtatttttaaggtgaaatgtgttttccaaaagcaaaacgtgtacccacttaattagagtttactacctgttttgatgaaacctgtttctggtggaggggcgtctacaccaagaatcatcggactactcgcttgcttgtgtgaaaccaggcaatatttattttcacggagctcaccagcgagtttcgggctcaccttctggtataatttaatacagccaagtaatttcattgaaagatgtgatttgacaaattgtcagaggttccccaaagatgtctctccatctgtcacagtttgcttggatttcttggtaaagatggcaacttgattccagaaattttcgagtggcagtgacatcttcagaattagttctaaagagacgattgtggtgaggcgatgaggggtgaggagatagaggtaaggcactatttaggaaagacggttttaggattcttgaggaaactaaagtacaatatatttgctgatcatgcagtccggtgcattctttcattacttatggcctgccagacatactgagttctgtactaggcaccagccacaaggtaaggagaaaagccttgcagggaaggaaaatgacaactaataagggacagatatggtggtattatatgcccaataccacccagcattccagaggcagaaatgggaggctccgtggacaaactggtctccatagcagattccaggctagccaggaccgtgtctcaaaaatagaaaacacaagcacaaaaaccaagtacagctgattatttataaagatattaataataatatgattatgtttacttatatgtatcattatatgaccacagcaatgttctcccacaaaagtcccaatcatgccaaacctgttagcttctgaatcagggaagagtgattgaattcaggggggtctgcgaaacgtgaagctcagattaagtctaaggtcttttcagtctagactttctgtgaattagctgagaactcaaggaagaagaaccaatcggatacacagtgccccaacctttactcctaagtagtttttaaagtttggggaacaacaaagtcttaaagtaaatgcagagaaagtcagccagaatgcaaagtggcttttatctgcatgtctacattgagtggtggtgtttttataaatgccttcaggagaaaactcagtccctaaattgtgtttcagtaagcaggaggtgggggaagccaagggttttcttgcttggtagaaaactagtggtttgtgtgtgtgtgtgtgtgtgtgtgtgtgttgtgtgtgtgtggtgtgtgtgggtatgcacataggcatgtatgcacatgtgcgtttgtggtggccagaggtcagcctcaggcatgtcattccagtggagctacccaccttgctttgctcaaagggtctcactgggatctggggcttatggattagagtcggctgtgggctggttagtgagatcaggcatcctcctgtctctgcgtcaccagtgttggggttataaactgcagcagcatgcttggcttgttacaaaggagctggggttgggctgagtttcttgggcttctgtggaaagcattttatcacgtgagccatgtctccagctgactagtgtttctttacagtttagtggagtaggtgaggatggcccaggatggtaatagacaggtgacagccaagaggatgactgaggtctgctaagtgacacttatttgtcaggtttagtcctcagatttgacatcctcgggatgttgaacctttgacttgggcatccatccagtttgattttgttaaagggatggctacgtaggatggctatgtgtatttttctattcttttccttttttcttttttttctttttggtgaaaggaatcctgcaaagtaggccaaagaatgattgataattttttttgtttgtttttgtttttgtttttcgagacagggtttctctgtaaagccctggctgttctggaactcacgttgtagaccaggctggcctcgaactcagaaatccgcctgcctctgccttccgagtgctggaattaaaggcgtgcgccaccacacccagctgataatggtttttatttttcaaatttttatgtgtgtgtctgtgggagtagagcccaaggccttgagcccaaggcctcacacataattccaaatgttctgcaattgagnnnnnnnnnnnnnnnnnnnnnnnnnnnnnnnnnnnnnnnnnnnnnnnnnnnnnnnnnnnnnnnnnnnnnnnnnnnnnnnnnnnnnnnnnnnnnnnnnnnnnnnnnnnnnnnnnnnnnnnnnnnnnnnnnnnnnnnnnnnnnnnnnnnnnnnnnnnnnnnnnnnnnnnnnnnnnnnnnnnnnnnnnnnnnnnnnnnnnnnnnnnnnnnnnnnnnnnnnnnnnnnnnnnnnnnnnnnnnnnnnnnnnnnnnnnnnnnnnnnnnnnnnnnnnnnnnnnnnnnnnnnnnnnnnnnnnnnnnnnnnnnnnnnnnnnnnnnnnnnnnnnnnnnnnnnnnnnnnnnnnnnnnnnnnnnnnnnnnnnnnnnnnnnnnnnnnnnnnnnnnnnnnnnnnnnnnnnnnnnnnnnnnnnnnnnnnnnnnnnnnnnnnnnnnnnnnnnnnnnnnnnnnnnnnnnnnnnnnnnnnnnnnnnnnnncctctcctctcctctcctctcctctcctctcctctcctctcctctcctctcctctcctctcctctcctttcctttcctttcatgtgtgcatgtttcttctgtgtgtgcatgagagtgagtgtgtgctatggaggtcagcggacaacttgtgctccagagtttgttctttccttcccccatgtgggtcctgcgtgagtatccaactgtggttgccagaagtagggcaagtgccttaaccctctgggccatctttctggcctgataatgctttttaatgagcatattcactatgaaaagcttatcttggatgcctgcactgtaattattaaatgagacttcagggagtttgagtatcatcgtcctgctgggaaatgctgcccgtgggacgttgactcttgtcttggtatttgtttgcagcatttgtagagtggtccaaatgattgttaaggtttgtaagtgacaaacacacacgcacacacaaacaagtttttgggtcagggagatggtttaatggataaatcattttgtctcatgtttgagaatgtgagaacttgagttctgtctcccgaactcatgcgagtaccagggcaggcatggtggcagcctagaatgccaactgtagggaactgtgtatactcagggccagctggacaattagattagcaaacttctatattgaagagtgttccggcttgctgagatggctcagtggttaagagcattgactgctcttccaaaggtcttgagttcaaatcccagcaactacatggtggctcacaaccatctgtaatggggatctgatgccctcttctggtgtgtctaaaagacagctacagtgtacttacatataataatcaataaatcttaaaaaaaagaagagagttcctccaataattgaaatagccaatgagaaagacatctgatgttattgatgggcctgcgcacatattataaatgttcctgcacatatgtgtgtgtccatatacatacagacatggacatcacatgcatatgcaagaaagtattgatttcatctttaaaactatctcaagggctggggagatggcttagcagttaagactgctcttccagaggtcctgagttcaaatcccagcaaccacatggtggcttacaaccatttgtaacaatatctgactccctcttctagagtgtctgaagaaagctacagtgtacctagatataagaaataaatcttaaaaagaaaaaaatctcaaattgtggcccctgatgagttctgtacagcccctgttgcggtaaatctcccacccaaataagcctggggaatgtaaacacaatgaatacatgctgtgcgcctagattgggcggatctacctctacgctatcatcttccccatataagagaccccttagaacttgcagtttctccaggccaggtgctctgctccactttccttcttttcctcctcctccattttgtttgtttggttggctggttttttttttgttttgttttgtttgtttgtttttgtattggtttcatctttaaaaccagctcaaattgtagccccgatgagtcctgtacagccccaacgtctgtgtccgtatgtccgcgtgactgctctgtctggtcactgtcacagcctgttttcttccttgtcttcgtgctcatctaatagaggaactttctctcagagaaagtgacaggggataaaggaagagactccccagtctcagagtcacttctttgcggacctttcccatgcaaaagggtaagaactttttacatgcgcagtcctgcagtctgtcctctggcggctttgctgagggttatgcacagtggggatgaacatcctcacgctttctctcagtgttgctgagtgacctccagcgctcagtcaccagggtcatagagttgagggaactgctattctgtactcagctcagctcggatttcttattaaaatttaaatttgcagggctggggatggagctcagccttgcctagtgtacaggaagtcgtgtgtgtgtgtgaacttccaaataggaattctgaatccccaaaaggtaccaactgtattcagggattcagcgagcttaatggagagcattatacaacttaccattctgcccaggcacaacagaacaattaactgtcattaactaagtaagaaggcttaatgtgattgctagttaaagacctgtgttaacagacaatggtcctgccggacttcaaagggtggaatggagatggcaggaatctgacgtgaatgttcactaacatgaaggnnnnnnnnnnnnnnnnnnnnttagcacaaataccacacacacacacacacacacacacacacacacacaccacacaccacacactaaaaattaaattagtaagatcattctttttttttttttttttttttgtttccgagacagggtttctctgtgtagccctggctgttctggaactcactctgtagaccaggctggcctcgaactcagaaatccgcctgcctctggtgctgggattaaaggtgtgcgccaccatgcctggctagtaagatcattcttactagtagacttgaggcttgccaaggcaacatttttttttaaagtcttcagtgctgtctaagcatttggggcgacagtgtggcgattcagtaccggtacacaaaaatgtaatggtcaggtctgggtacttagacttctccttacacattttatctgtgggttggcagccattgaacatctctcttgatttgtaaaatacacattgtattttcctaaggacttattttagaaagtagtggtgggggttagcatatccagaatgcacatgacacatccatgaaaacatcaaagaacaaatgcaatgaaaggttttgtttttttttaaagcaatggtggactttcccatcaggatgtgaaattttcacagaaataaatgtaagtggataaataatagcttgcttcaatccagctggccctcactgctactctgcagggggagtttccatgtggcccgcctccagcctgacgcccagggaggttcctccacagcctgttgtctgtcagctctgggcaggtgtcctggaggagcaggtgttcctcctcggtaggagaacctgcctgggaagccagggcaaggtggcctgagagcagacagccctggagcaaggcctcagccagttcttgggtggataatctgtcacccagcttgagctctgtctgctgcagctgtcaattatcagagcaggttttgtctggactttgggagcagcctctagttcaggagaggagtctctcactgggtgggcatgcgacatctgatgtggtggaggggaacctgagcagcatctctgtgactcaaggatgccctagggtgtgtgctgatcctgaagaccgtggtcccactcgcctggcctgtctcacctgtctcacattgagaccctccagctgccctgttgaaggacaattttcctggttgccttcatgttagtgaacattcacgtcagattcctgccatctccattccaccctttgaagtccggcaggaccattgtctgttaacacaggtctttaactagcaatcacattaagccttcttacttagttaatgacagttaattcttctgttgtgcctgggcagaatggtaagttgtataatgctctccattaagctcgctgaatccctgaatacagttggtaccttttggggattcagaattcctatttggaagttaatcatttgggtggtaatttcttaccactttttaaccctctaactgcactcttcttttctttctaaatttgtagaacccgaaacatgtactcactcagctttgccaagaacagaagttggaagggaatttataagcttttcaattttttctttcttttctctctttgtctctctctctcttctttctttctttctttctttctttcttcctttagggtttctctgtgtagccctggctgtcctggatggaactcaccctgtagaccaggctggcctcgaactcagaaattcacctgcctctgcctcctgagtgctgggattaaaggcgtgaaccaccactgcccggccttcaacttttccactcttggggtatatacaagcaaaataaatgaatgaatgaatgaatgaatgagaggagggataggccagtgaaatggaggaatgtttgtgccttttctgggaataagagattgcttgaagaattcaggtgccagttttctttgttcgtttaatggttctttccagtatcgacgtggcaactataaacggtactgacattgggagctgtgtcatttgccgtgtagatgggattatagaaaagctagaggccatctggtggtctctctcagccaatttagatccaaccagtttctatcttggccagcccacctgaagaggaactgctggcatttaaaaatcctgtccttgaaggtagacaagattaggggtagaagttctagtaactcaacttggcatctgtcaggattacagatttagaattctgctggtttagaacaaatgactgtcactttcggtctggggctgaggcttagttgagtgagtgtctagcatgacagatgaagctcaggctctgtcctcaacactgggcatggtggagaacaccagtaatccctgcctttgggaggtggaggcagaaggatcgccatattcaaggtcaccagagctatacgctttgaggttagcattttaaaaaatatcttgtccttttaaagaaaatagttatgagcaggatattgtggctcagacttgtagtcttagcagctgggaggtagaaacaggaggactgagtttgagactacatagcaagacccggtctcagaatagtgaagggtggaagtgctaaggatttcagcatgcattctgcttgggctgtgggagggaactcaggctgagggtcgggctgtgcctctggcctcccacctgatccttgactggtctgatcctgtttccttatctggaggggaggggacagaagggcagtagagctccagctgtggtagagagtggggtggggggagcatcagagggtagacggagagctactcacttgctaggctctattgctcttctctggtcgttgcgtgaacgtggtaggaattctgtgggctccacagtgttactcagtgcaggagaacacagacacacagttggcttcagtgttcgggtgccgggtgcacccacaagcagtatctggctcaggatggaaggttccacagcttatctgctggctgagtaaataaacaggtatttcgggagctttggtcctgggccttatgtggaatgcagtggagacacctgtccactccctgcctgtaaggagtttctgatctgtgaaaaccagctgtagcttcatgaacacttagctttcctcagagattggctggggagctctctgtgtttagttgccaaatgagggctccaggttgtagttgcctaagagtcgagactgagagagggagggaagaggatgaccccagaaaacttcccatcagagtctcaagctgttccaggaaggattgaggtgcagccccccccccctcggtagcaaaatcctaagggaaagatgttttagatgaacaaagagtccttagcagtgacacgaagggcctcaggatgctggagctcaggcctggggtttgcatgtcagctgtaactttctcattggcaaagtttttgtttctgctatgacttaataaggttctcatgggcacctagccacagtgtgttttccgcaaccaagaagacagaaacacagcaacccgtgcggtcacctgggcttattaaaattccaagggacctgcgttagttaagatttctttatgtctgttttgagctaagtaattcattctggcaagccttcagtttacaacagagagggcgcatgttcgtgtgggaaggagaataaaggagtctttgattcatttgcttctgagctgctagtgcctgaacttggactttggaggccatcttagcccagctgtgtgagggccagccagtgttgcagggcgagaataacgccattggctcgcttgaaagcgttctgactgtcgatggggtgttggaggtcctctcattcacattcctggcattaacatggtggcccgtctccatccatccctagttctctctgaagctgccatttgaacttgaagtcacatttctgtgactctttatctcagcccgtgtgtccactaagtatagaaagcttagtgtctcaaggctctttttctctccccttggattagagcacagataaaattagtattcgctagattactgaggagaaagtggtccattgtgatgtggatttccacatttgttacattcctccactctttgcctactaacccagggtggggtggtttaggaactttcaggggttgtaggcaatgcctgtattgctgggaaaagtcatttcaggagccagaggtttctgatagatcattgcagactccttcacatagtactgtaaataatacaaggactcatgaactggaagaatctttatattttggacaattcttttattcatgggggggtggggtgggaaatctccctatttgaaaagttctttccaaaatcatagcgatgtggtaacctgggctttggccgtcctgcagcctcttgagaggagaggcagggcctagtaatgcatatttgggccttatctctgttacttagctcttgacgcttgctgattacaacttgtagccgccaagtcccgtcctgcaccattatctggaacaaaaactttccatgtggtttgcctcagctctgcctcggtaggcacagcactcggtggaggtggcagaggtggcggaggtggcgggagtagtgggggtggaggtggaagtttgtaaagagcttctggaaggggtcacgtgagtaatttaatattttcctactgtttaagttatcctttccctgccttggcatgtcttccagaaatgtttgtcattcttctaaactgagttatctttcacttttctgctctggatagaatgccgcatttactaacggttcttttctcacgttctttccctctttgctctcacactctttgtcttagcttcttgctttgaattcctccttgccctagataggtgtctattcttaaaacaaaaaacaaaatccccaacatcctaaaaaggaggtgaggaccaaattgccacattgttttttgaatttaaaacaatatactaaagtctaaacatttcttttcaatttaaaaatatcccccccccccgttttttttttatttaaaggaagaaaaatactaaccttagctttaactatattattgtgtttccttcctccctttttgtttattttcttttgctttgactcagctcaagtccagctcgatgcagtcttctggtcgtctccagagtatggagcacatggagactaacaatggcggccccactgactgtcaggagagaggcctgacctctgaagagaagggggatgatatcacaaagcaaagaaggctttattgtgtcctctcgtgacactaaattgaattatcttagcattattagaacactacaagaagtaagcagataaatggaattgtattcctttaaaaatactttagatttattgatgtagttttacatggatggatgtttgctggagctgtttgtctgtgccaccagtacatgtgtgcccagtgtgcagcagtggcgtgtagaagaggcaatcgggtcatctggtctggcgtccttgatagctgtgaagcacctgtcgtgcaggtgctgggaacggaacctgggacccctgaagagcagtaagtggtcctaagtgttgtaccaccgctctgggtaaccgtaattttggttaggaggtctgctttctctgatagatactgactgtggcactaggatttttttttttttttgatagcttgacttatttttgttgtcgtttctgttgtatttaatgctttggcttgcctgttgctgtcaaatggtttttaccagagaaaagtaagtctgtccctgttgctggagtcctcagccctctgctcttaacttgtgctactactgtaaggtagccaagactggagtagtggcggtaactttactcagtaggcagcttgcttcatccagtctgctacatggccttagttaccagtgcattgggaaatgtggccgggctacttctgactccgcccagaggtgactaccacattaaagaattagcagccctagtccctagctcagcctccccattggtgctgtagccnnnnnnnnnnnnnnnnnnnntgggacccctgaagagcagtaagtggtcctaagtgttgtaccaccgctctgggtaaccgtaattttggttaggaggtctgctttctctgatagatactgactgttgcactaggatttttttttttttgatagcttgacttatttttgttgtcgtttctgttgtatttaatgctttggcttgcctgttgctgtcaaatggtttttaccagagaaaagtaagtctgtccctgttgctggagtcctcagccctctgctcttaacttgtgctactactgtaaggtagccaagactggagtagtggcggtaactttactcagtaggcagcttgcttcatccagtctgctacatggccttagttaccagtgcattgggaaatgtggccgggctacttctgactccgcccagaggtgactaccacattaaagaattagcagccctagtccctagctcagcctccccattggtgctgtagccagagtctcatagccaagatttaacttctgctgcttggcaaaatgccacttgattcccaggccacaagcactttagcatttcagtttgggatgagaaatacttgggaagctgccaccttccataatttgagttctgatggaggtatggggcttagtgaggaaccatggcctcgtttagtgaggggggtattatttgaaagttataatggacctgacaaattctccctgataatttctggtttaagtgtgttgaagcattgagaaaaagtgacagggagcactgagtactggcgaaagcagtacaatctagtgctactgttacctaaagcctcctcatggggtatgtaggccatttaccacccagaaaagggccagaatcaactagatttttgggagtagtatcctcattttttgttctgtacgaacttgtcaagggtcaaacttctcagcgtacagtgctctagacaagagcagcgagccatgtggttcgggcagcagcagcaagctacgtagtgtcattttcaagttgattttcataatggcccacagaaagcgcagaaaacgagagtgtgtacttattccatccattgtgacatttagtcgtnnnnnnnnnnnnnnnnnnnntctgggtaaccgtaattttggttaggaggtctgctttctctgatagcatactgactgtggcactaggattttttttttttttttttgatagcttgacttatttttgttgtcgtttctgttgtatttaatgctttggcttgcctgttgctgtcaaatggtttttaccagagaaaagtaagtctgtccctgttgctggagtcctcagccctctgctcttaacttgtgctactactgtaaggtagccaagactggagtagtggcggtaactttactcagtaggcagcttgcttcatccagtctgctacatggccttagttaccagtgcattgggaaatgtggccgggctacttctgactccgcccagaggtgactaccacattaaagaattagcagccctagtccctagctcagcctccccattggtgctgtagccagagtctaaagcatagtgtgggaccttgtgcgatcgcttgaacagtataaccaagtagctgtagacttttgggcccagaattctaaatcaccttgtccagtttctccttagctttttgattccttcctcttggtgtgttcaatgccctctggcttttcatttactgtgcctttgatttgcacagcaaaaacatttactattgaatattcttttttttttcagttgttacatctctgtcctggtggagaagagtccgacccccccttttttttttacggggaatgaaaatgagcctcagggagactaatcgatttgtccaaggtcacacaacataaccagctgtcccaccagggtcagatgtgtcatggctcagggcaaatcctttagttacccagtgagagctgagggtaagcaaggcactgtggaaaactataaagaagaggccaagggggcattgctgtcaccttcaagaggttatatgttcatagaggacctgggatgtgctgctcacactcagaatcctatggtgactcatcctgagatgagtatgagatgcactcacagaattcagcaaaaagggattgattcagaagttcaggaagacttcgtaagaggaacatttttttcagagcttaattagggacactttcagaagtaggagcagggctacagtactcagttacatggttcccttttctagccacccttgaattggttatgtaggtgtagctgctggctctctcgacagtcagagccgttgccaccaactcctaccatggagcctcgtcttatcagtgtggggataactatagttcttccatgaaattcttgggtgtgttgagggacgtaggttgtagtctgcttaagtcctggaatccctaagcactccagtcctgttttgtttttatccattgtgagactgtatactccttgaaagtttaataaaagccctgtgctcaggtggtctgccacatcagctttaaagaaagacttctgccactaagcgtgatgatccacactcgatccccagaacccacatagctgaagaagaaacggtctctggccttcttctcatgcccacagtgtggcatacaacatagtaatgttaaaacaaaacaaaaggccctgagcgctcagtttcatcagaacttttagaacttttagaaacttacaagtgttataacttgtaggatttctgacctgtgaaacctgtctgtgagtctctctgcgtagttacaggccttccagttttatgctgataatctgcggcttctctccacccagtcttatgggtccagctgcttagatggtctacagaagtgccaagggcccatgccagcattttacccttcagacttggtctccctgttgcgccctcaagtggacagtgctgagctacccttcttcagtggcttgagaatactggtttccttattctgcacacgcagtaaccaaaacaaaccctgtcagtttaccacctcagtggctctcgactgttggccctctcctgcctttgtttggaatgctggagctgttaactggtctctcagtacagccttgcaaagatctctttgtgaacagagccaggcagcttttctgaactgaaaagctctggactgacgttgttggttctgctgtgtcgctgtgctcttagtagcgcctaggcctttccccttggctcagcagggttagtggtcatgtggcattggcacatctgtccaggacacatgctgccacatccctcattcagccactgcctcagctttgccggacttttgtgtccccacttgtccccaagacctgttattctgggctagccccctccaggaagtcttggccttctttttcactctacaccgagactaacttctgctgcttctcctctctgccagcttcccctggtctccatcaccagcacagacacagtgtgcaagactgttgtgtcgttagcataaactggccgctcttggttgtactgacttctgcaactgctcatctcaaactgtgtatggtatggtgggtagcaggcactgcgacttctgtgagtccagctactcctcctcgcgtgggatcgccttgtgtatgaaatttaagactagctgtagtagcacctgttcctaatctcaacacttgggaagccgaggcaggatgacttcacgttggagagcagtgggggctacagaacaagttccaggctggccatggatgcagagtgaaagcctttgccaacaaaccaaaaacaagcaaacagaaaatggaaaattaggtaaaggtgtttgcctaaaggctgaagacctcagtgtgataggttgggagaaaaattgtatgatcgttacacaaacagatgtaacgggagaaagcaaaaatcatattttgaaatataaatataatctgagctcaattttgttaaagtatcatggtcaccaaacactgtttcttatgtgtgtggtgggtacatcgatgttgaatgaacagaaatactttgcagataaagtccacagcatatgtcagctgatggattgggacaaaggcaagacaactactcagctcttcagttacctgacacttttgtaatcacccaggtggctctcaaagaataatcctaaaatgtcattgtgtagtccctgggaatagaaccagtctcaggaaattagacacacttaacacacatatactcactaccttataatatatatttaagagtaagaatcggggctggtgagatggctcagtgggtaagagcacccgactgctcttccaaaggtccagagttcaaatcccagcaaccacatggtggctcacaaccatccgtaacgagatctgactccctcttctggagtgtctgaagacagctacaatgtacttacatataataaataaataaatctttaaaaaaaaaaaaaaaaaaagagtaagaatcattgagaagtttctgatttcaaaacgattccctgagttggcttactaacaggcatatttcttgagacgttttgacatagatttgtgtagggctgggatgcctgttttgctgtgtctgaagacagatttctcttgcagcatttagtagagtcaggactgaaacgcctgggtaaaccattgcctccctgcacccacccccacccaccgcgagacgtggtgagctgccttctatagagaagctctctctaggcctcgtccttacactcctgctctctgttggccttacttcccctgtgcttcagctacaagctgcagttcagatgcagagtcctgttgtatgcctggagtcaaagcattgtttttaccctggtaaagttgagaagaacagacatttgagaggctgaccagaagctctctccagtgaagaatcaaaacccaatactcattttgcctcactctcctagctagagcgcagcctgttgtttgggggtggggtgctgagtcatgcttttattcatgagtttatccatgcttttttattacctctgctggcagatcaccatccattgttcatgagccgcccagcttgttgacttttataagttacatgtaatcaagccctcttgcaggtctggctaccataactggcagtcccaccaagccgggctgaccagtctgcatttgtgctgactcccatgttgggtatctgttctgctcgccaagtgcccttgcctcctccacctgtactgccgatggaagagaagacacctgcttgggggttggggggggggggagcttgcagatgtaatgggacacctccacagaacttggtggagagctcattgtcctttagtttaggataaatgaagggtttgagggagttcgtgatgtcacctgggtcacttctaaaggaaggcttgctgttttcttcattcccttttcctagctgatgacttagcaagtataggtaaagtccagaaactttgaaaaacaaaaggtaagcgctgtgttagagcgatggctgggcagtaaggagtacttgctgcttttctagatgagggtttttgtttccccacagtttgtttcggtggctcatggctgcctgtggctctcagctccaggggatctgcccatcacacatgtggcatatacatacacaggcaaaaaaaccacatgcacatagatagaataacttttaaaaagcaaatgtttatatattttatgtatatctgtgctgtttgtggatatacatatttgtgtatgtacatatgtgtgtaccatggaggagaaaggtctatgccaatatcttcagttgctctccactctgtctgtctgtctgtctgtctgtctgtctatctatctgaggcagtatctctcactaacctggaacacactaattgtctagaccagatggtcagtaggtcccaggaatccccctgcctctgatttttcttcattaaagttactgatgtacactcacatacctggctttttaaaatgtggctactggggggtagctatggattactcaggtactccagagcaaacatcttacaactgagtccctgccccagccctggaatcccacagcaaaaatctgaacaacccttatggtctgatgtaggtgggcctcagattatagttggggaaataatgatcttggtgcaaagggaaaaagaagaaagaaaaatctagtagaagcaaatattatttacattgtaataagaagactaaaccaatggccagaaagttcctctttgattttctttttccttccttccttccttccttccttccttccttctttctttctttctttccctttttttttttgttcctttgagatgagagcggactagagaatccttgggaatacaggtgtttagttttgcctctttagtttcattttgttttgctgttttctcattgtgattgacatcagcttatccttccaaaaggatgtgcttaagatgacaaaaataagagaatattcagaatggttagaactaaaaagtacctaagtattgctaagacctcaaaagatgtcgagtcaaagaaggaattaagttgacactcattagacaagaatgtgaatccattccaacgaggatgcagactttgtgaatggcttagaggtgaagagcagagaggattagttcttcttcatgagttctggttattctggttataggatctgaaagcatattattaaagtcatatttcctggaatagttcaaaattcaaatacctttcccctgcctgttgaagacaggacaactggcttgtacttctttttcgttttcagattgattggttcagttaggagcaccaggcgggttgtacctaacaacagaagtcagacctcctatttttcaacttttaaaaaaaatatatgtgtagactccaaagtccacactcaagaatgagagctgagagacccagtctgttataggaagtcatctaagaagtagaccaggcaggaatggctgtttaagcctagcagaggagagaaagcaattcctcctgtgtcctaatgaattcccttttcatgtggaaagctggcttttgttgttgctaataatacaggatttccttcagagaatttttaatgtcttgttcagataccacacagagagatattgaccacaaatattaatactggtttgggagatatgttgatgtgatgttgtccctacctttattaaactgaccatcttaataactccatccatcttggcaccgacacctctgcttttctacttactgtgttccttacaactcctaggccttagagcggtgctgactacattacccgtcctcttccctctcttctatcttccaccccgccctgcccccctttctccagggcttacttccacaggagcactccatcctcccaaggaccctgcccatctgcctacaagatctgcgagcatcttcgtatctgccttgtaagtgttgaggatcattactgtcattatggggagcagaggccacgcccgtgtgctgctcagagcccaagtgagttgggtcagtagatccttagctgctgaagcaaacaggagggctagtgctgtgtgctggtggtgacagagccagcttctctcactgacgctggcaacccaggaaggtgctcttcatggctgccactccgctctaagcactgaagagcaggcgcaggagtgtttctttttccaggtgacttcctatctttgctgtttggtgctgccatactcatatgcttgtaggtgcttcttactggccttaatattcctggtttagcttttggagcctactctattccatatatatttaaccaagaggtggaggtttccagtgatccccttattttgacaggaaacgggtcttagtgtttttgtcaggcttgtgtgtgtgtgtgtgtgtgtggtctaatcaggaagtcatccaagttcaactttaaaatgcccataaactatcaatgcaagtgttgcactcagagtattcttttggggatgtagcacatttttgaaaaaaaaaaaaacaaaacgattgtaagacattaagttagtgcatttagtgacaatgacatgataagctactaaagggaaataccttgaccctcaggcctaccctatcgccctaagtccctctccaaaccctcccaccctcccttcagacatggtcttatgtagcccatgggggaatgtttctttattagacttattgtttaactatcctgtatttattatatatttatgtgttataactacctatttaagtagaatgtgtacataaactgatatactatgttggtatttaattttaggtaatactgttattaattttgagacagagccattatctcactgtgtagccttggctggcctgggactctgtgtagaccaggctggtcttgaattcaacaaagatttgtttctgtctccctagtgctgggattaaaggtctgctacactgtgtatgtcttaggtcataaatcttaataatcccagtatatttaaatctttaaaacgctatatataacctagaaactttttattttgcttcaagggtatttcatttggttgtttttctatctgtccatttgcatcagagtttaagtgaaatcagtttgttttgttgctggaccatttttttttttttagagcaaatgtactttgttccaatttggaaagctagttggtgagaaccctgagctcctatcaagggcagcggaagctggctctttaaacactttgcatctttgaagtaagctcttgtcttaacacagtcctcttttcacacatgagttcttggtttttttttttttttttttttttgaactgcatgctttctaactctgagctgattattgattattgaagcatttaagtaaagagatgggagaaagatagaagtgcacggaccaggtgaacatgttgtcaggcaaaggaccgtccgcgcaagaagacatcttcaggacccgagtttataggccacctacgctggtgcatcttgtattcccaacatggaggtggcggagactcatggctccctagccattttgcccgctgtctcagaaacaaaatggaggacggcggagggctgacacctgcgcgcatgcgtgcatgcgcacaaatgcacagagcacggccgtttctcttattttaatgaacggagaaaaaatttatattgtctttacttacccatttttgttctcttttgagacagggtctccttaggtagccctggcgctcacggaactctcgatgtagatcaagttgaccaatgatgttgagagaacatcttgggtctgtatggatgtgacagctgtcagtaatatctgatggcctatagcttaggcaggaaataggaggtgggacatctggcaggcagaaaggattctgggataacgacaggcgggagagtcgccgggaccattcgaggtggcagacgcatgacacctgagtacaggtaaccagccacatggcagaatatagagtagaataaatgggttactttataagctagtgagagaagagcctagttatatgtccaaggtatttgtaatttgtaatattgtaaatgtgttttgagtctgagtcttactcctgggagcatggggctgggaggaaaaaccatcaaactaatatactcagacttgcgggaaaccttctgtaggtgcttctaggtatggtggtagacatggaccactatgtccggcaacttttttctgagataaacgtttaaactgttgtgagattgggctccaactccctgcggcatctcattgacacctggtagaccctccaaattgctggggctgtagttgtgggccgccatagccagcattctccccacactctttgctgggcctgcatttcaggccaagcgcctttccactgagccccaccnnnnnnnnnnnnnnnnnnnnnnnnnnnnnnnnnnnnnnnnnnnnnnnnnnnnnnnnnnnnnnnnnnnnnnnnnntagaattcaaatttggactagaattcgaattcactttcccaacaggctgcttcttggacagcctcaggctcctcccagcgagcaaagtcttcccgcctaagaaactggacactgctaatctttacacaccaaaagagagagcctttaggggtccccaaagcagtggcaatatcatacattcatctaagttggctcctaatttgttaaatgtggttagaaaccattttctgttttattttgatacagggcctcctgtagcccaggcctcaagtctctgtagttgagatagccttggtctactgagcttgcactttcccccaccccacccccaccccaggctgggcttgcaagcatgagtcaccattgctcttcggccactcagtagtttgtagagttagtgctcctcgttgttctacagctcatccctggtatctccagacagtctctggaggcagtgcacagcacatcggaggggctcagtacccacgcctcccacgaaggcgtgctcctctgtggtattcccacccttaccgcaggaagaaggtaatttcatatgcgatttgctcagctgacctacgcagatgatcttactgtctcgtatacttctggaaatcccacacacctttcctgcccctgaggaaaaatttcttcctgatgctgaattcagagctgtatttaatcctgagcatatgagagtgagtcaccttggagtggtgagcaatcccactcataccttccaccttcacgtcagcgtttgaaactgaagaccttggtgcatgaataaagtctgacatggagactgctttcaaacctgagaacagtagtgaaacttctttccatcccctccctctcttcccttcttcccttctttctttcttccctccttccttcctctcttcctttctttctttctttctttctttctttctttctttctttctttttttctttctttctttctttcttccctccttccttccttcctttctttctttctttctttctttctttctttcttccctccttccttccttcctttctttctttctttctttctttctttctttctttctttccttccttccttccttccttccttccttccttccttccttctttccttccttccttccttcctctctctctctctctctctctctctctctctctctctctctctctctctctctttctctctctctctctcaccagtgttttttagttcagctgcaaatgaaactgcataacttcagctctgaaatgcgggctatgactggaatgtttgttcagacaagaaagcaaatgtttttctgaggaggcagggaaaaggaggattgaaaattttgggtagtctgagttttcaaattcagactaattgagctgaatgactaccgtttttgtgatgtcactgtgtccccaaaaagacagactttcgaggttcaggagatagtgttgaacatgtgtgtcattgttagggtgatatttctgtcattacctgcacagtgggtaacctttacctctatttctcttatttgtacagtgtcactggaagttattttaaaagcttacagtccttgtcaggggccttgagatttctaggataatttcaaagaatgtaaatcattaatgatcctttttataccaatagaacaaaatatgaaagccaatgactgcttccccaaaaggccctgcgctgtcccctcctaagagcttgtcttaaactggcagttctccagctagcctcagccttctctcttagcaagtgttgggcacgcctgttttaacctgcgcaggttcacttcccacagatcgaaggagggggccctgtgtgatgcgggccctgggctagccttattaacatattttgaataactgtattggaatgtgtgccagctttgccaggcttttggaaacttgccaggcagcagtaggagtttttgagaggactgtggagatgtgagcctgcaatcttttttctttttgttcttggaagagaaagattttagaacacgccattaggcccacctcatgaaatgagaaccgggcacctgtatctcatcaccccaactttcccaacgacctctgtctgctttagttttgtttcgttttaattttgtgtaaatttggatcttctctatcactttttggttttttgagacagcgtttctcgctgtagccctggctatcctggcactcactctgtagaccaggctggcctcgaactcagaaacccacctgcctctgcctcccaagtgctgggactaaaggcgtgcgacaccacgcctggcttctatcacttttttttttcttcgaaatatgtgctgtcactctgtagctggggctggcttggaattccttctgtagatcaggccagacttgaacttttgagagatcgacctgctctgcctcctcccaagtgctgggattacaggtgtgaaataccacacccagatttttaactttaattttttaaaagtatcttaggagatatttggtaagttgacctttgtccagcaggtttgaagctttttctgggaggcagactttcttctgggaggttttgtgtgtgtgtgtgttgtgcgggtgcctatgtaaacccataaatgcttctaccaggacagacagggtaaactatggcccctgtagagtgatgctcacattataaagatgccatatctgtagcctgggatctgtgtctgtccttgacacgtgatcaagaccaaaactttgggttctaatattagaattgaaagagaaggcttctagatgtgttcatttgtactgttttgtttgtttgtttttgtttgtgtgtgtgtgtgtgtggggggggtggtgatgagatacaggtgtccagttctcatttcatgaggcgggtttgaggagcactgctcatcggagggcctctcagtgtgaagggtgtgtgggatggatggctctgtggtgaggcgcctttataatctgtacccagtatgatgctttcttactacgtaccctctcagttcattttgcctccttcttctgtccagtgctagggattgaacccagggtttcacacatgtgagacaggcgttgtggctgcactcccagctcatgcctctttgggatggagtgtttccggttagagacagtagctctgacctatcaaagactatgaattgaagctgggtgcctgtaatcctagcccttaggcgggcgaggcaggaggatcggtggggctttgagggtagcctggaatatctagacagaccttgtcaataataataataataattattattattattattattattattattcagcaatgacggtacatttactaggctcaccaaggggctatagaggtgtctcagcggttaagagcacttgttgctcttgcagaggacctgggttcagttcccagcacccacatggtggttcacaaccatatcatccaggaaatccaatgcccttttcggggctctgtaacactgtgtgttccatatacacgcaggcagaaacactcacacacagaaaacaaaacacatctaaaacataattgaaaaagtagactcaccagaaatggggttccccttcccagttgagggctttactttttcttttgtctcttcaaagcctgttcttaatactttcaatatagggtctcatggtgcccaggatggttttgaactcctgattctcctgccttagccttctcatttgctttgtatgtatcaccacaagacttacttaatttttttaaatcatgtaatatggggtatcagaaataggaaagaacacatttgattattgttactaaaaaggcttttaaagttggaatttagtttatgggactatctggcagaaaaccctgagttccaattctaaccccctataggttgaacatggtggtacctagatgtgatcctagcactcaggatgttgaggtgtaaagaaccaaaagtttggggttatcctcagctatatcgggagtttaaagttagccttggctacatgaaaccacatcacctgccctccaaaaaaattccttttagaattcagtgtctagagaagggttctggccttataagcgaaactgtacctctacttatttactttaaaaatatgtgtccaaggctgacatagtactcttagtagccaggctagccacccactatagcgttcctcctcccacttcactttctcaagtgctggcatgatagatgtcagccactgtgcccggaagcccaccgtttttaatagatattttaatgagccacatgcactcgcatttcaagcctttttttatccagaacgctttcaagtttctagattggaattattgtgtcgggttcttttgttgaacctcagtgtctgtctgacttgtagttttgtcaatactgcctgtgattcataggtttatatggtcaccatttacaattaagaggggaaatataactttgtttttttccaaaatttttcggagttgatatataacagactgttaaaaacaaacaaacaaacaaacaaataaaaaaaaaccattgtgagtctttatgaaacaatgtgtgtttatgctgaacacctttgaatatcatttcagaaaatctttcttctcttggtatagagtgttattttcttcgcggtgcttcttcaccttggcttgcacagggtgcaagtttatgaagcgctgcaaatttgactgcttggctgtcctctccgacacccgtgagggtggtagatatgaaatctcactcttcaacaagtacatgcatgagagtaaaacagtttattcaggtcataaaacagtgctggctcccagcccaagtttaagctgatagcgtgctgggggcgcagcggcgatgactaattactgaaaatctcttcagaatgcgttacctttaccagacccaaggaagacttatttaggggtacgtcagatatcataggcgaagctcaaatgctttttttgttgttgctttcttatgtgtgtgttgtcaatcacagcagctcggttggtatttgtggggacacatgcagcctttttaggggtggttgggctctccctgttttgggggtaaaaccatttccacacaagtgaatctgcagaggctgccttcaggtgtatgtagtgagctttaactctttcagcccttgtcctgacttgtctgacccaggagcagctggctccctggtatattgtataatgtagactggctcgtcaattcagactagctcgtcctgtttggtgggtttgttagaaactgcagagctaagtaaatatgcgataacagtttgaatggtatttgaagttaaagagcgcttgcagactgactgactctgagggacactgtggccagggaccccggggctgcctcttgggtcagtttccatttttatctgagttttaggaaggcaccgtagtaatgaaggcctggtcagatgacagcaccttccacatgaggcacgcagtatgtcatgtctgatactacggatgccaggggttaactctgtcacctcatgagccagtgcccactcagtgcccactcagtgcccactgagaaaacagggagggctgaatggggcctgctgtgtgggagagtgtttgctgatgactatttctgtgtggcactgtgttccctccgctgtagggttatttcctggtttctcagaacaacactgtctccctgttaacttcatgagggacgtgtcttgactgatgggcgagcctctaagttctctgaagggctttgtgccttgtcagtaccgtccccctacacacacacacacacacacacacacacacacacacacccatctccttcataagatcacctctctaggatgcagagtggaagtcggatgctgacacatacacacacacacacacacacacacacacacacacacacacacacacacacaggttcactttctgatcagagacaagtgaagtcttagaagatctcaatttagcaacaacctgtgtccccacccccacccccagtgagtcactcttagtttgaaataccctaaaagagtctctcatttctgtaggtcagacaggttgtaacctgcccgactgctcagcggcattggtgttggatgattggagagagaagaggccagaactgtgtggccttgtactgacaacctaactgtaggtctgcttgcagacagagcagtcctttgtgcaatgagtttccccattccattctactcgtaatagtgaggacatgatagctctatgtgtgctatatctcttttttaaaaaaaattagttctgaaattggaatgcttttcaagctctttgtttttctgattctgttttttaaaaacagttttctgttttaaatttgcttttattgagattgagaaactactttttctttcttccttccttctttcctttcttctttctttcctttcttcctccctttctttctttccttgagacacggtttctctgtgtagtcctggctgtcttggaactctctatagaccaggctggtctcaactcacagagatctggaattaaaggcataaaccactctacctggttactttttattactctttgaaagtttcctatgtatatataattttgcacctatttttgtgtgtgtgtgtgtgtatgtgtgtgttggctggcatgcatgtggaggtcaggataatttgtgggagtcggtcttttccttccaccatgtgggtaccaaagatagaactccgttgttcaggcctagtggtaagcagctttatgcactgcggtgtccttcctggccccactgtggtctttttctgttcatgaactgaggattggagaacctctgttcattacagtggccgcttgtgtgtgggtaaccgtcagaggtcaggagaagataagatgagggttagtgtaaggcgtcctccttggacatttataaagtggtgtcagcatcaagagtgtgaaggatagttggcaatgggaacttcttttcctgtaagtcccttccccaaaccctctccctccctcgtgaaaaaaagtttgcatgcaagttgatgcttctcagaatcctgatgcttgctttcagaggaattttttttcctgtgccaaagttttgtttttcatgtgacttcttgtagcaacttgggtcttcctgaaaagactttttaaagtgcattggtaaatgtactggtaataaacccaaaggcaaatttactgtagacgtttgtacagtttagttaaagttactagggaaggcaagcactacccacagtgattgaggtgaaagtgactgtcacttgtaggtaaggcaaagtcgcttcccactggagagtgagtgtgagctccagagaagcttccagttgttcctgtgtcccaccaggacaccacggcttctgctcctcgctgacccagctaggtggagtagcatcatggcgcgttaaccaggaaaagacgcttcagctttcaggctggacgtggaactctgtggtaaacttccatgtgtaaacccctggatcaagtcttagtctgtctgtctgtctgtctgtctctctatctctctctttaggtgtgtgtgataaactgtcaaacacacaagaatgctttttctttttctttttctttttttttttttttttggtttttcaagacagggtttctctgtatagctctttgtagaccaggctggcctcgaactcagaaatccgcctgcctctgcctcccgagtgctgggattaaaggcgtgcgtcaccacgcccggcttacaagaatgtttttttaaaacagattttttaatgtgaatctgtatatccatgtgactatatgacacatgtatgctgaggtcaagagagggcatcggtcttcccagaacccgggttgcaggtagatgtgggtcctgggaactgaactcagtaagaatagcaagcgttcaaactcatactgagccacctcttggaagatgttttttttgaggaaagagtggtattacatcttgacctgattggtaaaaacaaatcttgtttttctagttttgggttcttttgctacagggtcttgtctttgtagcccaggctagctatgaatttgcagtttagtccagtctagcctccaactctgcatgcatcctcctgtctcagcctgacccatgtcatagatgatcaccattaaaacactacaataaggccgggcagtggtggcacacgcctttcatcccaacactcaggaggcagaggtaggtgaatctcttgagttcaaggctaccttggtctacagagctgagctccaagacagccagggctacacagagaaactgtctccaaaaacaaaaacaacaaacaaacaaacaaacaaacacaaacccaaaatgagagcgacagaacacgatggtaatatactcatccttccattaatttgaagaaatgactcaggaatgccaataagtgcttgctcagcaacttacagatgctgactaagatgattcgttgcatgtgtttggtctgaaaacttaacagtggctttgaccaaaatagtaagctgttacctgatgtgccatatcagttaagagttgctgttgtaagcaacagaaatctctgctttaaccggaaggggaggttttctccctctctccctctctttcccacccctcctctccttcctccctcctcccctcccccctcaagtcctccctttcttgcgcgcgcgggggggggggggggcttgcaggtattcgggagctcatagactttctgggactcagcaacccatgtctggggcctcattcttgctccttgagatgattcaaaagctggggtggatttgctgagtgaagccagtgtagtgaatcttgtgcctacattttaggttagagcagtggttcacagcctgtggattgtgacccctttggcaaacctctgtctgcaaaaatatttaccttatgattcataacagtagcaaatttactgccatgaggaagcaatgaaaataatttgggggggggaggcagtcgctacaacttgaggagccgtaataaagagtcacagcattaggaaggtttgagacccactgggttagagggaacacagaaaatgattatctaagattttcagttttgtggggttaagggttttctgacacaggaaggggagaccatacattgggtaacagaaaagaatcagttttcacatgtgccatgttggtggcatgtgttggacaacaggaaggcttatgtctccattacatgtgacatgtggtgacaagtggaaaaaataaagatgagctccactcttacaaataccttaactagacagtggtctctgggaccagggaggttgtccaggaaggaaaggaacttgtgaagtcaaggatccgaagtcggtcccttgaactcccgtggcagcaggagaggactgcctcctccccagcccgtacacaacccctcacaggcaattcacaggaaaaatataaaatgtctgttaaccgccatgagaaaaatgtagtaagaccaatagttttcagtattcacacagtagcatccacaaatactaagtagatatttggtgtagtgaagggctgttttgtggttggcagctccaggacttgggggcggggtggggtctcagacaaaggttaattcaagttggggtgggagtgcagtgtgcctcgtggttttatgaggtggctctgctgtgtttctcggtcccctcgcactttctcttggtggaatgtttgtcctcacacacactcctgtgcaacccctgagctccagtggacccctattttgggggtgccaaagtgtatggcgcccagactgtacctgccagaactcagaaggttcggtgatgcacctgaacagatactttcagcaccagctgcaccttggcctgtttattttctcagtcactgtgcggctggcctttgaggcctatagctctagggtagtgcagagctgtagtggctcaatgatttccccaccggcaagccctccagagaggccaggtggtggtggtggtggcgggggcggcgggggcggcggggacttggctccactgctcccttctttatgcagaaggaaactgatgctcagactggctccccaacctatgcagctggaatggggtgacagattcaaagacaagagactgttcaaaaccctttccctggtctttgaaccagtttcctcctcacagacatcttttagaggagaacagagagcctccctgacctggagagagtttcccagcgcttctgcatcacgtcccttcgcccacgatttaacttttttcctgagttgaaagatgtccccagaaagcgacagaggccagcaccacaggttctggagtcacagggtgaaagatagcctgtggtttgggtctagaggggcgttcacagaatgaagagagaacaggctcggaagcaccttagaggaggagggactatcaaaagattgtttcggacttggcaggaggcaagccagaagagccagaatgggaacggctgccggagccagaacacacttttaaaaggaaaatggatcccggccaggtgctctggagagggtggggtgaactggccaagcaggaagttacggcgacgttgtgtaatttgcagttgtgttctctgcctaccttctctggctaaatcagcctagaggtgcagtgatcttaaagagagaaaggaaaaaaaagcctagcttgttctgggacaggtgcagttttgtgcttctgggttttagttgtttttcagtgtggccactttggccttggggcccaaatatcttgactactcttggtgttttcccgtgccgcatgctgcagctgcatcgttgctttaggcagtcctcctgtaagagtaactgggctcttacattcagaggctactctgccacctcccttctgactcgccagtggtaacttccatccagtctgacctctgcttcgtcccctttcctgatgttaccctgcaggatcattgcaatccacctcccaaaggctgaggatttaaatgtgcaggcttctgggctggagccatgcatggtccccagcatccacacagcaactcaccatcacctgtaactcccgacctctgcaggcttccagggccaccagccacgtacatggtatacatacagacatgaaggtgaaacacccataaataaaaaactaaacaaacaaacaaatacaaatgtggctagctagattattctgatcagccttccggagagaactatacagtgctttggtgtaggtaagaatacgtgtccccatggctgctgtatttctcagattctaatagtcattggtaaaaatacttggaaagcattccgtgtgtgctatatatgcacaggctctagtactttatccagtatttacacgtcactggttactaggatgaacacgaagaggctttaggcaggatgagagaatgtgggtaggctttttgcaaatactccggcacttgtggaagggacttgaatctagaaccagctcccaacccacacatacacacacccagggaaatgccaaggtacgatcatagcgcagaaaagagtgagcatcttcttgaaggccacgggtgcggttggatcatccaagtgaagcgcacttggatgaccggaaggttgagtatccagagtggcgtctttgtcagctgagctgaggaggtgtgctactttcttctggctttttggtacagcctcggcctgtgattccagcttctctccattgtgctagggtctcgaagagcccttcctcaaatccggcgagcagctccagtgtttgcttgtcccccaccccgccccacgtctgtgcagatgagtgtttctccaggctccttgttgtggagatctgttcaaagaggtgggagaaggggaaggactcaaaattaaacctccccatgtctacttttggtgatctgttgctgatctccatatcccttcaccccagtggagggacctgttaactggcttttctgagtgcctttttctttctactctgcattacccctctggtctcacccctctttttctaacccttaagggttagttggtttgtttttgttttgattttgtttttgtatttttccctctgttagaatccatgtcttggtctggagagatagctcagtgcttaagagcactagatattcttccagaggtcttgagttcaattcccagcaacaatgtggtagcttacaaccatctgtaatgtgttctgatgccctcctctggcatgcagatgtacatgtagatagtacactcacacattaaacaaacaaacaaacaaataagtaaatctttaaaaagagaaaaagagaaaccaagtctagcagaggatgtgacatataggaggcactcagaatgtggggctcgtagctagctttgtgatagaacctgtgtggaccatgtgaggccctaggctcctccttccccaacaccaccaataaataaacaagtaaatctgcctgcctgcctgcctatcatctatctatctaacatctatatatctatcttgaatgaacaagtatcagaaggagagatggaaccagctctctgtcctcgcccttgcatcccttaggctctgacttgaaggagtctttcatctggagagcatttgaggtggttcccactctgaagctctgagtagtttctacatggaacatttgtgtgtgtgtgtgtgtgtgtgtgtgtgtgtgtggtgtttagtgtctctcagctgcaataaaccataacagacatcgtttctatgggaacatgcattctgagccctgatgaatccattgcatccaagcccgtgagagaacttgtcagtcagtggggaccttaatcaatcacatgtctcctgttcggctttttaaccacttttcgtgtaaatgaacaacgggctgtttctttgctgaaggaccagaatgagagaagccttgtcttctgagaatataaattattacattttaaagtgaatctccttcatccaacacacagggctagtttatgccaagtatatttgtagtgtgcctagcacaggctgcatgatggtataggagtgcttcacacatgtataagtaagaccgtcccccgcagaggtcaggattagctttcacttaaagaagactggaactcagcctcgaaggtcgtttccagatgtgacgcggcgattctgcgcctttggaactgctttatccatttgcctgtcttccttgactcacgcggtcctgttaccaaatttatttttagacacagtggacaaaagcacaatgacattttcaagtagccaatagcagtgtcaccctttcaagacccgaaaatgtccctgctatcacgacgcaaaacctagaagcaaacagtatggtgctgttttatttcctctcactgtattttggggcataaccgattattgacttcggagtgggttagccttcctaatttattttattgtattttacttactctgtgtgagtgtttgtgtgttatatgtgtgtgcgcgcatgtgtgtggtgtgtgagtgtgtgtatgtacatctgtgtgtgtgaatgtgtatgagtgtgtgcatgcatgtgagtgtgtgtatgtacatctgtgtgtgttttgtgtgtgtgtcagtgtgtgtgtgtgtgtgtgtgtgtgtgtgtgtgtgtgtgtacatggatgcttgcagacacacaggtcagaagtcagttttgaggttcagttctgtctgcccgtgggccctggtagtcagacgtggttgaggtttgggggcttttgctcactgagccatcttgttgacccacacagtagatttttattctaactttaaaaaaaaatccttaaaaaaagaaaagaataatggcacatcaagaaaatagcataaaagtagcatgttaaagacttaaagtccagatactttcactttaaaaatctatgtgatgccaagcagtagtggtacacaccattaatccctggggaagcagaggcagttggatctttgagtctgaggccatcctggtctataaagtgagttccagtacagccagggctactcagacaaaccatgtcttgaaaatccaaaaataaataaaataaaataataataatacaaataaataagcaaagggagaaaaagtgtatgtgatattccataaagatgatctatatgtgttaagaatattcacttttggctggtgtctgtttgttcggttttttgagacagggtttctctgtataacagctctgactgtcctggaactctccttgtagaccaggctgacctctgtcttacaaagattctcctgcctctgcctcctgagtgctgggattgaaggtagctgccacccctccaccatgtcctttctttctgttttctttcagtctgtgtactttctgcaacagttgtgttcttctttcctgtccacatcacatgcgtacactcactcatgcacacagcacacagcagagcgtctctaaagtctttctgtggctcagacttctcaaggtcagctccgtagtagagcaatttcacttctctacgccagctactgataagtatttgtagtgatatgtatttgttgccgtgtggatttctcatctaacatcagagcagattcttttaatatgaaacttgatctttggaatctggttcccataattatgagaaattgaaacctggctcatgagagattagttgtgttggagggagagaacaatccatccgttgtatgcagtaaccttccttggtgaggctgaaagcacctgagtcactggggttgaaggcagacactaccacagtaggcttgtctgtcacacgggtgctggcgatggaactcaggcctgcatgcttgtgctgcaagcttgtgctccactgctgtaaaagcattttttcataactggcaagtaatagctaagtaatagtttcatgatgggaaggaaaatcaacagccggatttagaaaattaagattatttaacagacactgacatctgcaaataactggtctttttcctatggcaacagaggcatgtatggtggaacaccgcctctggtgctactagcctggttcttgggtggcggggggtgggggtggggtgttagtcttacactgagaactgcattcacatgttgatcttcctactaactttgtttttttttaaagatttatttattattatatatgagtacactgtagctgtcttcagacacatcagaagagggcatcagatctcattatggatggttgtgagccaccatgtggttgctgggatttgaactcgggacctttggaagagcagtcagtgctcttaacccctgagccatctctccagccctgtttttattttttaatatccaacatgatccaacatgatctagggtcttaaaagacaacaaattcatttttctttctgggtgtttttttttaaactttttattgattctctttgcaccccagtcccactaatctccccaccccctcatatctacccttctcctttgcaacgtcctcccaaaacatacacacacacacattgtggaagctgtagtgtgtcacagtgtgtcccacagtgtagccctctgtccacacatcttcacttgcaaatgtgcattgacatgagtcactggtctatgttcctggtctctggcttctgggacaccatcaatactggatcctcaccagaactcccagttattctgttgttgccctgtgccatggagaccctgcagctttggaacagcaggactggcccttccatgcatccaacctttcacagatgacacagatttgggggtaaggcagttcagagccctgggtgtgggcctgggggatagctgagctagtcagcccaccggctctctgttatccacaccaccagagcaagctctggctaggttaccactcccagcacccaccccttcagagccagctctgatgctgcccagttcaggttcagggccctctccaagtactgtaaccttgaggggctgggccagctctcctgttctcacacccttagggctggctcaccagtgcccccttaaccaggtccatctgtgctggtgtagggctcactcatctgagtgttggagctggtgatgggcagcactaactctcccaaggtcatgaccctgtgggcagctttcttgagtgctggaggtgacgaggaacaggggccgtcacctctgcatcagtcccatcccaaggcagatgagtaacggggtcagctctcccatattcctgcccttagggctgacacacacacacacacacactgccaggaccagctctactcttctgtctaggcgaagcacagggcctgctttacagagtggtgcacccaatgagaggcagggcatcccctggatatccgcgtgatcccctcaacctgatccagccctactgcgctgcccaggcaaattgtcgagcctgctctcctgagtgctgcaactggcgagggggcaggtacagtgactgccttgaccagagacatctccaagttctctagtggtaatacaaaccacagacattgatagtgacccctgtactacataggcatggactcacacgtggtcttcagtggcagctcaggctgggacctcgccatggccccaagtgacaggcagggctggccactcacaacaagctactcctctccatcctccagtctctcgttccatctccttcatcatgcccaagctgctccacttctttctctctcatctgaccaccacatacttgcatatcgtggtggctcgtgctgcacactggacacacagctggtgggcccctggacaagtcctccatccatgttgcatggtgtcgtggcaagtgtatgtctgtggcctgcctgtgctgtgtgctggagggcaggtctatggatgccatggtggtccacaggtctctttctgtgctgcccggatgtgatttggtttggtttggtttttatgagtcctaggcgtaagacagctttggccaccaagccaggctccaagttagaatgaatagagaggcctgccatctgctctgccccttggccgggttggggtgggcaaatcaatgttaaactcttaaaggtttctggcgtttgtattctacactctgtgcacgttgtagtcttcactcgtaattttcaagtgcaagggaggagcccctgctcctgtgccagctgtagtttgtagttatccacagggttttgttttgttttggagaaaaaataagatgatttgctctagctttgaagaaacgaaaaaaactatgggctcctatcagcatggcaaaacatttgttgtgttttatggctaaattgctttctgagaagagaaattgatttcaagaagaggaacccgtgagcaggaccacacagctcatttgagaagaggggagaaacttgactcctggggccttagtttttgttttccctttagctgatgtcaagtgtcttggactctgctgttcttggggtagatgttggttgtggttgttcaaagcttggacagggaggtggctgtagaaagggctgctttgcaggagcgaggtctgccaggaaccatgcccctcaccacagcctccattctcacctccaggccgatccatataatgggtgccttgtcaggaagcagggcaggactcaatgcagtgtactctggtgggaaggtggacactgtctagcacaaatgtcttccacgttgacatcagggaactctgtgggaggatttgttaactcaaagatgtgtgaagttaccctgtcaagtatcctaaagttgtatttactctgcatccaacttagtatattcagctaaggggaacaaatttctgctccaatgggcctacctacatcactgaaccatccctctagaaagagttgtctctgcattgacatctgtttcctgtaacttcttgttttcctaaacttgttgtttgcttgtttgtttgtttttggatgtaggggagggtggcatgtactatagtgtgcagtccaccgcactcctgttgagttcaaaaaatatcttgtgggagtcagttcttccttctaccacatagcatctggggatccaattcaggttgttggccttgtctcacctggccacctgtttctctctcccttttttgaaactctacaagacaaagctactttcttgcctttgtcttttctatccagacagtttcattgttatttctttaacagtcctccattggctcagctcacacttactgcacagctagtgtgggcatgatttgttcttggtgcccagtgtcagacagaggcatcttgaagggtaacgactgatatggagccagtgaatataaaacatgctgtctgccagccctaacagtggagacaaagagcagttaaccccggtcacgagaaaactgtggtttcaataaggtttcaattccttatgcctcaaccaggtgatgcagttgccaagaagcccagccggactgcctcatcaccctgtggatgagtgatgagagccaagaagtcccacgtactttcttcctgtcaagcaagccttagagtgcttcggacagacagcagcaaactaggaagtgtttataaggtctctccattgccaccttgaagaaagccaccatgtccctggttctgggctcagcctttccagttagatcaaattgatcacacagcatgatttcagtcccttaactgtgcgaatctttctgtgtataattaatatcgcctcttaaactgctgctctcagaaggcacctggtgtctccaggtgtggtttcttctaatgccttttgactttctttccttgagctaggttttgttttttgttttttgttttgttttgtttttacagatttatgtatttattatatgtaagtacactgtagctttcttcagacaccccagaagagggcatcagatctcattacggatggttgtgagccaccacgtggttgctggggtttgaacctaggaccttcggaagagcaatcagtgctcttaaccgctgagccatctctccagcccttgagctaggtttttgtttgtttgttttgttgttttgtttaattaggcagttgacgattgaggtacccgtaaaagaataaaagtagaagaatgctctggttggttctcagtgtcaaagtattgctaggccgcttcccttgttcagtttattcctgtgtacagtatagtaacttagatttctctctcttaaaattataagttctttgctttccacactttattttctgtcaggatcttatttttttaatttgtttatttttatgtgtgcatgtttggctttttatgtgtttttgtgctttgtgtgtgtgcttgggaccggtggaggacagaagagggtgtcacatctcctggaactggagtttcatgtggttatggcagttaaataagttaactagttaatagttaatagtgagctgttgagtaggtgctgggaattgaaccggggtccttggggagaactgtcagtgttcttaactgctgagccatttttccagcctgagatccttttgaatattgtctctcacccttactttgccatttgcagaactgataagcacatttgcagtcttcatctaggtgattaattcaattgtttccttaaatgatgaaatagtaccaggctgttcccagtctcttaagtgacttttcttttaaaatggcattgcagggagctggagaggttggagaggtggctctgtggctaagggcatttgctgcccttgttatatggtggcacacagaaacaattataacaactgcttcaggggagccaacaccctcttctggctgctgtgggcagcaagtatacatgtggtacacagacatatatgcatacatacatgtataaatgcatgcatgcaagtatgcatgtgatacacagacatacattcaggcaaacacacacataaaataaaaataagtaaatccattttagaaaccacaaacaacaactgaaatgattttttttccaagatggcatggcagttaacagtgagcactcttgactctgtcatccacagtctcattttatccaagcattgactgcagtggcttcttggtccttaaagatgagacatgaccacaatttaaagtagtcacttttagctcttctctaactcattcattatctggaatggttaggtagaaatggaagctaaatctcttgtctttgcacgccaccctttcttctggtattttcctcttgcttctggtaaaccttaaaagaaagtgggaggagactaggctctgccctgtggtccgtgctgctgtgtcgactgctgttgggctctgtccagttcatctggcctccgttcgggagccacattccttcttgtattcagtcttagttatctgccaaagcactagggaatgtgtttggcttagtttttaacttatgatctcaggtcagttcaatccctggggcctacatggtaggaagagagaactgattcctgtgagctgtccttggacttctgcacgagggctacagcatctgtgcccccccccccacacacacacaaaaataaataagtaaatgtgattgacatgtttgctttctttatgtttttcaagacaaggtttctctctgcagccctgtcaatcctggaactttgtctgtagaccaggctgacctggaactcacagagatccacctgcctctgtcctctgagtgctgggattaaaggcatgcactaccactttgtggcttatatcacatattaactctgcttaaatgactgtggctgattgtgactttcttttgtttgagagggaggcccatatagctcaggctatccttaagctcactcagttgctaaggctggccttgaactacctcacttacagatgtgcctcaccatgagtgactgacaatgtgactttcaaaggagaattattaaagccatttcttgcctaataaagaagtccactgagagtggttcttaggctgagcagagggccaggtttttgtttttgtttttgtttttgtttaagctacatttaaagtaaagaagctacttaatgtttatgtgtgtgtcctgaagaaaaggcaccaacagtgtgtgaagtctgtggactttactccaggggtcctgtgtctgtcctttactccaggggtcctgtgtctgtcctttacttgtaaatgattttcagctgacaagaagatgtagcagtcacgcttatagttgttcagcatggctgacacagagtacatgtgggcaccattgtccacatgggctgatggtgaaatgccaccattggggtggtggctttgatggactctgctcttgccccacctggacagactcattttcagaagtgtctgagtttgcagggaccccacacaatgcagaatgtcctcggaagcaggcagatccccccccctccctttaagcaagacttccgcttcaggtgatttccttgaactaacactcagcggccattacagtactgttatttctgctcatgggattttgggtcatagccttaaaaggtgactcaggaacaactggcatgattttgttagattggaaacatttgaatatgaccaagctttttggttgaatgtatctactttaaattcatcaatgagcactggagagatagcttagagattaagatcactggctgctcttccaaaggacctgggttcagttcctagcacctacatggcactgcacaattatctgtgacttctggcctctctgggcaccaggcacactggaacacaaatatacatgcagacaaaactcatgcatatagaatcaattaattaaaaagataaaattcatcgatgaaagcaccttaataatagctgaagattaaattccatttagattccctctaaagatcctgtgggtttctgtaaggctcctgcctacttcataccctgctgttctggtggctttgtgtcctttgctagttggtggtccctgcaaggcaagaatcaccacttactgtcttggctcccagcactggtcaccgagggatggagattgagaggaggatctgactttgagctctcttgcctcagaataggagatgctgggaatggccttcaactcttgactgtctagtttcccctactttagcctgcagtgggtcttagccttggcatggctgccattttggcctgtgagactgttttgatgcctgtgctaattaattgtgtatttggtctctaatcattgaatgctgtgctctccacccctcaaaaaatctgacatccaaaatgtctccagccatagccaaattcccctgggagcaaggagccttaagctctctggtaaatgctgagcagggccatcagcaaattatagacgttcagctttggaaaggactgaaaactattgccctctggggcactcctccctaccccagctctgaattagtgaatatttgaagaagaagaagaagaagagggagaggaggaggaggaggaagaggaaggagaaggagaaggagaaggagaagaagagaggaggagaagactgtatgtgtgttaagactgggttggaattgtatgattatttggttcaagtttatttacaaaaggtgaacttgttttacggtaaacgtttttacacttatttatttactgtggcatgagcggatgcatgggaatcctggcatgtatgtagagaggtcagaggacaacttgcaggggctgattttctccttttaccatgtgggccgcaagggtccaagtcaggtcagcaggcttgttggtaaagcatccttacctgctggcctgtctcaccagccctaagaaagtacagacttatatggccttattaacatcccaggaagagtagtgtctagacccactcttctttaaatgtaagatacatagtaagcatttctccagttcaaacgaactgagcaaactctatgagtcaccggaacctgccttctggcgtagccctggagtactgtgtactgtagcttcttggagagatttaagtactcatgtcaagaaagagacaatgatttgattccccttcacctgtgccaaaaaaccaacttggtttttcctctcttgagaattgcgacgaggctcattgtgtgactcctactgtgggttgttgttttataaggggcgtttgggtcttactaggtttcctcacatgaaggtaagaacaccaaattaaatattagctgcttgtggttattttaagactcatctcaataacctagagaatttggttctcacactttgtactttctgattacaaacagcttttaaatgggtttatgttgtttttccatcaggacttacagagggtgggcagcggagggacgcttttgggaccaacatgaggcaattcagagtctctcttgcgtgtcagctctttctgctttgatctctatctattattcttactctgtcttttcaaagattctgtttggagaacttctctttagcgagatcacaagagaaaaatggcaggacgctgtgctctggagtcatccacctatttctgaggtagggtaaaatctcactgacatgcgctttcttggcctttggtgtcctgtgctctgtttagatggctcttttttcttttatttggtttcaggtagaccctagacagtctcacctagatgtaacacaaatgtctctaaaagttgtggatgcatgtttctgtgtaactcggaaggtagcaggaggcttcaggagctgttttcttcatgttttcttcatgttttccttgcttcatcggcagatcaggctttcaattttctctgttctctctttttgtaacctcttttaaatattaaacttgatataatctctctgaaaatttttttgactatgtatgttggtgatttacttgttcaaaattaataactgcaaagcctgcctgcctgcctctctgcactttgtatttgaaatctcttagcagggagacatttttctcagaacaaatcttttggcagacatcaagaagttaattattcctacatgaaatgctacttggaactttttgaaacatttcaatatctatgctgatttaaccaaaagaaaagaaaatgggttctgggttgaataactggggagtcctggcagacatgaccgtgtcagatgccttggcacggcctcagggcagaggggactttcccacttctcattgtaatctcccatcttcgtatgtgggagttttgtgaaggtcctgtgtttcactgaaatgctcagctttccgcactatgtatactgctctgtgagcacaggctctgtggatgtctacacatgtttaaaagaaaatgcaaaggaatggtggagaaaggcgtcactgtggttattattagctcatataataacgtgatccttaactttgcagtcggtcggtcagaatgtaaagtggaacgctctgtagaaacaggacatcatgtgtggtggtgagggtggcaggctctcagcatttatttatcccatcatctcttaatagatgttgttgtgcaggccagagatgttttcatccaagcagggtcagtggtaccttggcatcaacttatgttcaggagtcaaagtgaaaacacagctaaaacactaatgaagtctatagcttggaaaaggtgtcttttaagtctcatcgtccccagtccctgcatgctttctccatcacccccagtttcaggtctcacaggcccagctctggctaccctctgatgtcagggagcttcacgtcaccagacccctggtgccaaggtggaggtgagaagaggagttacaggcagttgtgagccaccatatgggttgtgggagcagaacctgggttctctgccagggcagaccactgagctacctagaagtcgttaaggtatcagtgtttgtgtcaccattcaaggagcaggcagagtaacagtgttggtgattagaaggtacccttttttcatttttgagtaaaaggatctcccacctgccaaccttgagtcatttcagaggacatcaacgtcttgtcacactttgtagccactgtaagtttgtcaccaactttacagaagtaggtgttgagatcctagactagattgaagccagaggtagtctcctctcaccctctcttctgggcatggggtgtttactgagcaggacaatgaagaagtgaggtgtcaggaaggacaggttccttttcctccgtgggttccattagtgtggtgttagcattgcagggcttgtgttacgatgggcccagtggttctttcactgagtctcgtaaagacttggagaacatcatttacttaactcctggacttcaattcccaagtccccatctatcttgatccctacatattgatgtatcatactctgtctactgtctgtctgtctggcagtcgtttgtctgtctgtctgtcatctacctatcttgaacatacttcccctcttagccccctctgcctcttttctcacccctcattcttactattagtccctggccttcctctccacaacatcggaagattacatctcgaagccctcttacctgtgagtcacagtctcgctatgcttctataattataatcatcaggcttttgatgcctactctttttaattcaagatagccttagccaagctgttaactgcagattaattcatatgctgtcatgataggcaatttagcaatccatagagatgcagacagacacagagggggactgactgtagagtggcccattcttctagtttaaggccaacccacctagcaagctcatgtcaaataatgtgggcgactatatattataccttaagagatctgtgtaaaattgactatcgctgcttctgaaaaggagtaagaaagttagattattataaaaagaactgtagcctttacaaaagaatttaatctcaggattcttcatagtagcaggatctccagtttggttaaactgtaaaaatgaatcacttcttagcattttggcagaggtctagtgtaaaatgcaccatgacttatagaggcttggcttccctatgccagaaatgcagtctttgaacagcactgctcagcatgagccctctggggacatgctatagggcttgagaatttgtgctgtactggagtttgcaggcatacattttccctttcctgtgtccctgcccacacccaaagaagtgtccattaaaatatggatgattgacctcagctgttgactgagggagccacctgtagagttaacctttctgtggggataggaacatggagggtttcgatgccagcactacctctcaatgattttaaacaaggtacccaactccccagagtcttatatttgacccgttacatgggaagagggaacctcaactgagaaaatgcctttattagattggcccataggcaagtctatggggtgtttttcttgattaatgattgatatggaagagtccatcccactgtgggtggtgttgcccctgagcaagtggccatgggttgtataaatatgcaagctgagcaaactagtaagcagagctcctccatgaagtcttgccttgccttctctaggatggactgcgattagatgtgtaagccatgcagtcccataggaggaacaacaatatgaaccaaccagtaccccaagagctccctgggactaaaccacctaccaaagagtacacatggtaggacccatggttccagctgtatatgtagcaatggcctagtcggtcatcaatgggaggagaggcctttggccctgagaaggctcgatgccccagtgtaggggggtgccaggtccaggaagtgggagtgggtagattggtgagcagggggaggggggaggggggtttcagaggggaaaccaaaaaaggggataacatttgaaatgtaaataaagaaaatatctagaaaaggccaagcgtggtggtgcatgcctttaatcccagctctctggaggcagagacaggtggatttctgagttcgaggccagcctggtctacaaaatgagttccaggatagccaggactatacagagaaaccctgtctcgaaccccccgccccccaaaaaaagaaagaaaagaaaagatataataataataataataataataataataataataataaaagaaaacatctaagtcagaaataaaaaataaaaagtaaaagatgtgtaagccaattaaatgttttccttccccaaattgctttgggtcatggtccttatgacagcaatagaaagcagaataagacaggatctgacacaaagtgggcgctcagcaaaggtcagcatcttgccctctttctgtgtgggcagctcacctgcagtgtctctagccccatagggttgagctgtgagcctggagcactcacagtatgagagtgaagtacagtggctttaaccatagcctctggagccagacagcctacatgtgcatcagctcactgtgctcttgaagagtgtcttcctatcagtacctcatttgcctgctctgcaaacggaggctaatggcaaatgttcgattggactattgaagtccagcagcctctgagtcgtgtagagtgcagagaacacgcctacagtgttgtgcagtgaagctctttgtgttgttagagctcagtgtggaccaggctttaaaatctcatgggccgacagcaggcttcttagcagctaatagctcattggaggaaactcttgcttccgaacactcaggccttggccgcctctttaacaagaggtagctgttctcttagaagctgccctggtctttcttctcttccctgctccctgcatccactctggctggcttttgttattaatgtggagcagttgaagtcattgacttgggtgaaggccaggcagcattactgaagtcatatattactttcctggactggccatgagcaggatgataggagtcgggggccagggaagccgcctctctaggcagcccacatgaaaggtgtgtttgttttctccatcatatttgtgtaagtagatctgaagcccattcactgtctctagttttccccacgggctgctcttctctgcttaggctgactactcctgtgtgtgtcgcatctttctttgtcctttgtgacgtcattgcacaaactcctgtctactaattgcaggtagaattgttgagtgagcctggctgtatctgtaggcactttataatatgctaggtcaggtctgtgctttggtgttggcttttgtttttctcatgttagtggaatactgctgggagagagtccttagtgacagtcagtgaaagtcttcctcctcggagtgtggttgaagcacacacttgtttgttctgctctggtatttggggcctgggaaacggcagcggaatgttattaggcattttcctgaacttcctacctgctctttgctggaatactccttgtttggctctggaaaggttccatgctttgatgagcacagacgctcgggggatcggaggctgttttgatggtctgttggcatcatgaaaggagatattgtttgccaggggagatacagtctgggaaagagtgctcaaggatcgtgtgacctcagagtgagacagaacagtggtctttgcctgtgccattgagcttttaaaaaattgtttgtaactaataataactgaatatactggtgtagcctcgggttctgttttgggtttggtgggaatggggaagatggcattgtccagacttaaagtttcttttaactgtgttcgtaaatgattaggggtggttttccactgtgaagtaaaaactgattgctactggcattagccactgttaaattgtgatgcgcattcacttcattattatttcaacagtttcggtggggctttcttctattttctcaattcaagaacagtaattgtgaatcataattcctaggaaaattctacatcataatgaccacagatacatgagaactacacccaccccctctgtttttgctgtcagtttaataaaatctggacatcactcaggcgtgttgtggtgtttagaccctgtattttgacgtattgtggtagctgctgatttgtcctgagagtaccactgttgcatcctgttgcgtccctgagacactgttgcatccctgagagatccactgttgcgtccctgggacactgttgcatccctgagagatccactgttgcgtccctgagacactgttgcatccctgagagatccactgttgcgtccctgagacactgttgcatccctgagagatccactgttgcgtccctgagacattgttgcatccctgagagatccactgttttgcccctgagccttctcttgctgtttatttgtgagctttctagagtccaatgattcagagacaagagcttgttctatccctcagactactttttttttatcctctcaatacaatgaaaggagaagtatattcttttagtgctgtggtatttttatacctagttctcttacaatatatatatggatgaatgatggacccagtatagtggtatgtctttaattccagcaattggaaggctgaggcaggaaagtctagagttcagataaaaattaaatacacagtgagacttcatctttaaaaaaatctgtgtgtgtgtgtgtgtgtttgtgtgttcactcatgcatgcgcatgtatgtacatgtttctgagtgtgtccatgtgtgcgtgtgtgtaagctgggtgtgtaactcggtagacacttgcctagcatatgtgagaccctgagttaaactctataaacatcctaaataaataataaaaccatatttgtacaatgttttctagaaattcaaattcttacgttataaagaagaaaacaattattaaaccaatcatagaaaacctgttaaaatgttgagatagttactttcatatacatatatcttttttcccttgcttttaaagatagaatctcaggctagccctgaactctctaattctcccgtgtctctttctgtgggcaccactgcatccaacagccctgatcatttgctttggaaaaatactttaaatggtttggaaacctaggtttataaagcataatatgtgagcatatttcccacatcccagaccattcttggcaaatattatttaaatagctgcatagttctgtatctgatatgctttttcttataaagagttagagaaaaatatgcactaaaattaaaaagcagggtttgaaaacgtcgccttctcttcctttttaaagaccatttctgtttgtttgtgtgcccatgtgcgtgcatttatatgtcagaggctgacatgggtaccttcctcgttgctccccgtcttactctctgagagactctctcattgaactcacagatttcgttaaactgattgggcaaggatcccaggtcctgcctgtgcctcctcagaggtaggattactgctattacttggtgctgggaattaaactcagatcttcatacttgtatggtaaacattttactgactgtaccatctcccaaacacccctgtgccttttaaataaaaaaattaaggcgttgtctcatggaatacaggctgcccttggactcctgatctccctccccatgcttccctaagaaatgggtatgcggctgtctttgtctccttgacacaagctatagtcagtgtggaagagggagcctcagttgagtaaatgtcctcactacattggccattgatgtgggagggtccagctcactgtggatggtcacagcctgggctgatggtcctgtgtgctgtaaaagaaagcagactgagcaagccatgagtgagaagcagcagtgaacagcagtccctcatggtctccacatactttcctacctccaggttcctgccctgtttgagttcctgtcctatctcttccttcaacaatgagctatgatgtagtagtgtaagcgaagtaaaccctttcctttccaggctgcttttggttgaggtgtttgagcacagccatagaaagcctaagatgctgggattcctcacctggaaacccacgctcacctcgtggttctgttctaactttaaaagtaattagtttcaaagtttgagactatgcaaactttatgtttatatacaaaagatttaccctttgtaaaagtgacaatatataaaacgtatgaacatatataatagaagtcttttgattggcaacaattaattagaataattattttaattggctattattcatagctattgaatcagtacaattttcaaataatcaacttttatccccacttaaaaaaaaaaaccaaaccaacctctgaaacagtcttctctttttatttgaagtgaggtcaactatttttgcaactaacttgagtttatctacttgtgatatagattgagggtgtacctgattgtccttgatctcccaggccgcataggacaagaaaggctgtggcagtgaaggaaacggagccagatggcccccatcaagggtgccaaacctccagcagggatggatgccacaccagacagacagggcaggaaaatcacttcttcaagtagattttgccactgctgcacctggtgcggggagtaagcgtgtagattgttaaggtccactgggcaagcgaggaagaggtaaggacaccggccacgaggccaggactgggggttggcagtccttgggctctctgatgaaatccacttggcattctcatagtttttcaaaggaatctgggtaaggcatttaatcttgtgttattggtttagttggctcttaaaggagagtcataattaaaccagagccatctgccagtgaatcttagaggtgcttttcagtttgaaagttgaaacccagagtcacaaagccatctcttaagcatcggcctacagttgactgcatgttgctgtggtttgttttttccaccaagggagttgatttgggagaaagaatgtggttaagaattctatgtccccaaagacatctgtacaactgctcccaaacttcgtttctaaaagtgacaatagtaacacttattttaaaggtaagagggaggttgcgtgttaaagcatagcactgacttggcctctccgagatattagagactttgctattaataaatcatggcgagtcacgagattccacggtgtggaactgtgcttggatcactggggttcgttaaataaagttacttttcctttctgagtcaattacagtctcctgcccagaactacgcacggaaatgcaagtctttatgaaagatctccaaagcccattgaactaaacaacaaacccactttggtttatttgctctccccctccctctctccatccttccctacgtctctctgtccctcctgctccttcctccagcccaggtgattccttccagcttgtttctcttgtcattctgaaagctggcctgaccttcgcagtcagataattctaatttcagctcaagaaaagggagacggtcttgatttgtgtggccgtctgcattcatgcccaattatacacaacagtcatttgtccatggctgcaggggaggctgggagatacacacgtgttctgttagcgtagagtagggatgagggatcggtggtgccaatcgtgtcacctgtacttgcaaataaatcatgttgagacatagccatgcccttggcctgtggagggtctgtgtctcctttcatatagcacagtgaatgagctcagttccctgagaccatatagacttcaaagcacaccacatttactgtctcgcccttttcagacgcttgctgacatttgctagggaaaatggagaaatgaaattataagagtcaccaagagtttgtgccacactttgcagcttagtaaactgtgagccattgccatagctgggactttgtgcttctgaagagtggtagccaacagaaagcacggttgatttgaagtaacgcttgaagaagcactgttcagagatggatttttggagcaaagcaggaagttattggtgagggtgaagagagtataaaacgttgtttagaggagctagagaaatgaacacttgccactcttccagaggatctgagttcagttcccagcacccacatcaggcagcttacaactgattggactttatctcctagggatccaatgcctttctgtagccactgtgggtaaacacacacacacacacaggattttttaaaagctttcatgtgaatttctgcttttaaggcgacaggccatatttcaagcgtatcctcatctcctgcatcccacagattgttctgtgttttttctttgctttcttcatgactggggcagaagagggatacatccataggagggcatagacggtatctccactctgcagctgggttcatttccccaacttcagggtgtgccagggagcagagcggcataaggaggatcataaaagctgagctccctgtgagtgacagagtgctgcccaggccacttggaaggacaggaccttgcccacagctggtgtcttgtgtgtccacagccacagtcaagggaaggggggttttgatttggagagacatgattggccctgtgagctgcctcttctttccttagtctgtataaccacgcatacaatgaggagactaatagataatgagagacttgctcctgctgtcaaagacctcccgtccttcactcagctcatattgattaaaacctggtgagcttggccacagcattggaaagacaggtggacgaccaggaacttctaaaaggatcagcaggagagagagaccccgagatggggtgctggggtttccgctgagtccactgtgctgcttgaagcataaatacaagggggcttccagacccctgtgacagagggacacctgtctgataacggaggaaagcagaggtctggttccttatgctttggtgactggagctgttgaagaacaaaagcagattaatgtagaatttttctcaagcttgacttaggataacaacaagatggacttttgctaatgtgcatccagcccctggcagaacactctggagacagtcagtgctcagtacatgtttgttgagtgaataaattaggtggattttggcacttaattatcagagctttctagaagatgaaaggattccctagcagaatgatgtttttacagagaaaaaggcaaaaggctcttatcctccaggagcccctccttcactctctcatcttccacatgttcatgtctcactggcccctcctgctttcaggactttgggagagtaatggcgtgtagccgccttttatcaggagagcctgtgttatttaaccacgcttcatggcccctttgtagccgacacagatggcagaatgagttcgtttttaataatctaggttttataggaatgaactgtggtgtgaactgcttggccttccatgagacgaagtagaatcttgtctgtctgactatctattgtttttgtgtgtgtgtgtggtttttcgagacagggtttctctgtgtagctctggctgtcctgggaatcgctctgtacaccaggctggcctcgaactcagatatctacctgcctctgtctcctgagtgctgggatcaaaggcgtgcgccaccaccactcagcaacctccacagaatttctgaacagtaaaaaacgtttccttctgaagctgcttccttcagagtttttgagttttacataaatctgctgtaatagttagattacggaactggtgaaatggcttagcaggtaaaggtgcttaccagtgcgtgcagcaaggcgtgcgtgcagcaaggcgtgcgtgcacgtgcacaggagtggacacacatagccttataatgtaataaaaagtaagcagtacattaagtgtatttgtgaacaagtcaaatataaatcccttaattctaagctaatgtttctggcccagatccatgagagagtccacagaggaaaaatgtcagagagaaactctgtgtaacaaggaactttccctgaggacacagcatctgcagtcactggctgtttgtgctctgcaccacgcaggcctgcagttgatcattgtaccagactgcactactattgaggggacaataagacatccagcccatcatgtccctgtctttatttcaaagcagggaacaatagcagctcttgtgcccaaaactcacgcatgagatagtccatgggacacacctgggacagcctcacatgtagtaaggtactgctcccagccacgacggctgaacagagacttcaaaatctgacccaaagcagctaagactgctttgcctgctgccccaatggggaggatcttgctggcatgcactgtagcgtgccgcttgcaggcattctagttcctcccacccgttgctccagctcccagcctctggtagagccatcttcatggtaggagctagggtgtgctatgcctgtgtctcagctggaggcagagggtggcctgggaagtcaaactgctgacagtgttcatggcacaacttgtgtatttttaggaatttgtgtgtctctgatgaggcaagctgtttacttcctacttaatgtctaacctgaattctaggcctgaatctagaaaaggtacatttttgccatgctgtgtctgttgagagactcgggttatcggtccacaattgactgccagagagactgggaagtatccctgccacctggatttttgtatgtccagttactgcacattctcagtgtaggaaatatttattaaaacagcatttcgggtaaggatttagatgtcaggacaaggaatcgcagagctgtgccacaggccctgtatctcccatgagataataaatccttcgaatattgaatttaaacttggggaaatttttggattacagtgactctcagcatgtctataatcctgggaattggaggtgagatgcaaaatttgagggcaccctcaactgcataggggatacaaggctagcttgggctacatgagaccctgcttccgaaaggatagcccaaaaggactaaggatggctgtgagcacttgagtctttctaaagtcatgtctaaaatattgcttaggtggtatagcctgtatctcctccattgtgctgttgagttttagaatgattttattcttcctgactgtgattggactactagttgttccccaatgcccttagcctcttaacgattactggtgtatgtggctgtatgtgttgtgaactctttggcatccccatgtaagagaggacatgcgacacttaccttcccatgctagactaactagacataacattaactaattagttaacttaattaacttccagctccatcagtttcagtgcctatcataggctatcattttagtaactgaataatattccattgcatacatcctgaaattgatatgtcatttttccatatccatcacaccaatggtcatctaaattgattacacatcttgtgaattgtgctgccacatacacaaagtaacaacaaggatggagacattgatgaccctgactgtgtcagtacacatcgtatacatcgtatgcatgcgtcgaaacattgcgctgtaccctacaaacacataggattattacattttttttcttttttttcaggattattacattaattgaaagaaatgtaatgcttaaggagtacatattttactactatgatttgatcattattggctgtctccagctatcaaactgtagctctgaacatgtacaattaacgtaataactaggagagtggaaacaccttggaaggcctgctctggaataagcctaacccagtatctgacctggcaagggcaaagtacatagaagcagggtagtttacttcagagtactggaggggaggcggggaccgggcaaggcatggggctttcgagacttgacttttcttgttcagatcactgctgtgtatgtgaaggagacaatcacacgtgcatttactgtagtttttcttccccatgtcactgtcccccaggagacaaggggttgaagacacaggtttctgcatctagaagaaaggaattcaggttagacattaggtaggaagtaaacagcctgcctcatcagagacacacaaattcttaaaaagcagacaccttgtgccgtgagcgctgtcaacagatactgtcacgtggcagtaaaagcctcaggttcctgcctcgtccatgcttagaaactgctgaaaacggaaggactgggaaagatgactcttgacctgctgtgtagggttttagaaccgtctggaatagtgggtagtaacaccctgggagctttgtgtgaacgtgaagccctgcactggctaagaagagaagaggtgactgtttctggtttttataagtaccctcttgtctaactgctaaaaataactgctgttactttaaacagatggcctcaatttaatatgaaagaaagtaaaagtgagacagtttcttagcatctaagaactaccacccccactggctaaaatagccaaattttatataaatacttatttacagggaaaacttctgagggtggggtttgtagatggagctatgtatcttggtagattgagagccagtataaatgacttaattcaaaacagaacggtggatccttgcgtttaaaacaattattatcattatgaggtggtgcacaggtgtggagatcagaggacactctgacatgggtccctggatcaagatgagatcaccagccttgtgtggcaagtgtgtttctttacccaatgagccctctccccagtctaggactttggatttttaaaagacatttaagttgttataaaatatatgtaacctaagaaagttaatgtcagggatcgtaacacactgagagggtgagagagcacgccgaggttattgttttaggtcctctccaatggccaaagagaacatgagctgatagggttcaattccaggagcacggagatagtagttaatgtacgactttacgtcatttctgacatcatagataatattttgataaggaaacagtgagccagcatttatgagactttgactaaagactgattcttaagttcacagacactgtctatgtcatcgagtaatgccaaaatactattaagttcaacaggtagagaagttttattgtgaaactcggtcattgattttttttaaaagatttatttattcatttaatgtatatgagtacactgttgctgtcttcagacacaccagaagaggccatcagatcccattacagatgtttgtgagcctccatgtggctgctgggaattgaactcaggacctctggacgactagtcagtcagtgctcttaaccgctgagccatctctccagcccagtcattgatttttattcctacttttgctgttcatttgtgattattgcacctggttcttgtgcggggaggggtgctgtctgtcctgtgtgcatccatggaccacagaccgtgcttggatttagatgtttgcatttcctcacctggcctgtacctgcacagttgtttgtgttgggtcctgggttgcgcctggaatcttacttgtttccttctgaacttgtctctgtaaaagaagtagactggctcataggaaatatgaggctggggaggcggcactctgtaagatgtcaggggcacaagtgtgaggacctgaatttgcatccctagaatgcttgtaaaaagaccaggctttgctgagggagccagggaccctggggaggaaggtgggtagggtatggagttaggtcggatccctgtacctagttggccagctcttacctttccaacttcatgggcctcagttttagtgactgatacaccctgtctcaaaaccaaagaagaacactggaggaaagcccccggcttctggtctctgtgtgcactggcatgtgtgtgcacatgcaccgacatgttcacattaacaagtgcctcccctaccacaccactacccttacacacgactaccacacacgtacatgtatatacaaacacacacatgtagaccagagatcagcaaagtgtactgctgggctatataaaaaaataacatgagacagatatttgcagtagttagcctttacaaaatgtttgctacctcttgaagacaagatgctcgtgggccgacgctggttcagatcttggttttaccatttccagttcgacttgggcaaattacttaatctctctgtgactagttttccaatctgtaattgtaattatagcctgcctcattgggttgtggtgaggactaacttaatgtacaaaatgctcagaacaatgtctgggattaatgggtgctcaatgaatgttagtcagtgctcctgtgcgggagagagccccgaaggagcttctgaaccattcttggtttcagctggtacacacccaaattatccagcccactcgctctgtggttcctgtattgagaagggaaggctgtcttgttgttgttttgttttgttttttatttttaaatagtgaatgcgttcctgaaaaacaaagtcaagttgaatctacactgaaatgtgaaaaataatcttgaaaaaaaaaaaggagacataagcagaaagcagagatgctttgtaagttaagggaagtcaaaggtcgcttgtgctgggtgtgttggcacacaggtggcttatcatctcaggactctgaggctgaggagagagatgaatgcattccaggcctgccttgcctatgcagtaaagaccttgcctcagaaagagcaaacacaaaagtcctttgctgtactttggtaaagcaacttgtgatcgtgagagatggagaggagacagtggcgggggcgagggggagtatctcaggggaagctggggccttctcaagggtgtccagtgtcagcatccacgaggctatgcagagtgccgtgtgaccactctgcttcttttctatggaagtgatacattttcagcatcaaatcaaccataggtggtaaaggtcacctcagacccccatgtatacataattgtcatagtttgcatctttagtttttaagacacctggctagtcactcagttgctgtcgtcatcaaacatttgatcagcgtctcaatgcctttgtcctctctgatacctgtctcctcgcttgggctttccagtagggaaaggacaagtaattacttagaattttttaaatttaataaagtaatattccctccctctcactctccttctttccactctagctgaacacgctgttgatggatattggagtggaatgatgggtggccagagatgggtgtttgacgatgtcagaggactggagtaatggccttgcgtgaggagtacagtgaatgacctcatcttcttagctgatggaggcattcaagaggacgaggttgcagagcttttaagcctatgcagctcccaggctctgagcctaagagctagctaactgtcatctcccagagggaccatggcaagggttggggctgttgaaatacgttcagggaccctgttagggcctttctctttgacattaggatgatttagggaaggttgggacttacagaccagcttgagttttcttttgtggcaattatagacttaacttaaaagatcagttgttttttgttagtgtcctctgagtttgggtttgctgacgcagatacacactgcttcattagagcacctccctcccaaccatgacaacagtggcactcgtcagtactcaatatgttatttctggagtgagtgagcggatgaatggagtaaacaaatataacccattattcccaataaaatacctctcccacatggaggtaagttgtcagttggcattattttagatcaatttttgctattaaaaaaaaaagagtgttgtaaattttgagtatgccagagggaagctcaactcgggctttcatggtttcccagggcaaatggtgacttgatgagatagttaaaacacagcaacccaggcagcaaaggctttggtcagaactcttaacctctaagactatctgagagcacttggaaaagcttgctgttctctttgttctaagatgatagtgcagcaagaactaaaacaactttgagacatttctctttcagacaaagcaaattataaaacatgattaaccattacatcatcatacgtcctttaaggcctgacttccacacccttcataggccctggacagaacaagatgaacatccaaggtggaaggcatgctgtagggatctgctggctcatgggtcaggcttcctgagtggacaagaggacaaagggtagattccagcagaacctacctgcatagaattgctaagtatgtgcatgcattagaggggatgcatattagtttagtcttgctgttataaaataccctgaccaatgaaacagcttacaggaaaacaagtttatttaggtttataattctgaagggtcagagtccatcatggtggaaaagagatggttcctggggtcaacaacaagaaactggtgatcacacagcatctgcacttaggaggtgtggagagagaggacaggaagtgaggccagactataacattgcaaagctcaactcctgtgacccacttcctccaacaaggctttgcctcctgggttccatagcctcaccaaacagtgccaccagctggggaccaagtgttaagccacagaagcctgtggaggacccttcgtattcaaaccctagcagcctgtctctgagagcattcacccttgattgacatggggaacacgacaaggacactaggctagcagaaaagcaaatataattctagaccttcttggggcctagggaaagtgcaccctgtgactgcactgttgattgaaaactgatgcaaactttagaaataaaagggaaaatgtcgggggctggagagatggccagtggttaagagcactgactgctcttctgggggtcctgagttcaaatcccagcaaccacatggtggctcacaaccatctgtaatgagatctgaagataactacagtgtacttacatataattaataaataaaatctttaaaagttggggggaggaaatgtccagctagtgctacacaagtttttttttttgggggggggggcaggggtgagtagataaagctaatggtgccagagaaataaagagcaggttaagagtggctccactccaccttgccacttttagaagaagggcaaggcgggttacaaagcctcaaaacaagtctggcatgattgactgcaggtgagtgagcatgttgttcaacttgtaaatacatattctcctgcnnnnnnnnnnnnnnnnnnnnnnnnnnnnnnnnnnnnnnnnnnnnnnnnnnnnnnnnnnnnnnnnnnnnnnnnnnnnnnnnnnnnnnnnnnnnnnnnnnnnnnnnnnnnnnnnnnnnnnnnnnnnnnnnnnnnnnnnnnnnnnnnnnntccctccctcccttcctttttttctccctccctcccttctttcttttctccctccctcccttctttccttcctagcgtattcaccataaaccgaattaactccagatatttcaactactcctttggtttaggtgacttgagagacacaggaaagaaaaatacaaacattaaatggcattttgaaaacctgttcttaagtccagtgggcatcagagcagttgaacagcaggtacctgggagcactctggtgacacaggttgacacctttggaaggaaaggaattagtctgcccactcctccccacaaacagatgggcagagattggcaggtgaggtggagagaagaggggtaaacccaggctaaccgaaaggggagatggctatccacaaagagaaatcaaagcctaggcacacttgtgtagaactgggaaccaggatgcctgcgacagagattacggtattgccccagaagcccttttatactacttgatgttgtgtgtatgtatagattttatagaacaacttaaggtaaacatttacattcggtacatgttatttaatattaatatttaatagtttgtgccctcagtttgcttgcaaattatgattgataaaagaagtttaattcagaatctataaaaatactaacactctatgttaaaaaaattaattcctggaggtcagagaaatgatgacctaggtttaattcctggaactcatataaaaaagctagacgtgttagtgaatatttataattccagccctcctggtgtgaggtaggagaggcaggagactctctaggctctggagccagcgatcctggactacagcatcttggcagaagcaaaacaaagaccaaggtgagaagggactccacacatgtgcacaaacacatttataaaaatgggttcttgaatgaatgatttgcatggttatttttttgcagtataactacctaggaataagaatggctttcccgcgtagcccagtttgctgtttaactataaatacaccacttgtggcaaatcggacgtccaaaagcaacagctgctgcttctgtgttttgttctttgttattcattttaatgaataatttgaaccgactccagaacatgaagttagacatagaagcatgctctaagacttatatcatgtgtttcaaaccgtgtggtgacatcattctctaaatatagtgaattttaagaaagaattatttgagctgttcccccccccccccataaataatttggctggaagacagagagagagagagacaagggataaaaatcaacttgggagctttatccaagaatagagagctggggaaattctcccacatccttctcctgacacgtgaacctcttttactaaaacaaatgggggggatgtgtctccgctgagatttgcttttctagtgaagatcccaagtgatgttaggcgtatccccccctgccttccgtagtgtgtcctgtagctgaaggatttaggttcaggtggaatagagaggaagatggattcagagcttcgtgattgtgattcctgtctgtctctcgtggcattctcaacagttgaaaagcaagaaaatgcagcctttatcttcctatgtcctgggcatttgcttggcgtatatatgggctttgtgtgctccatctgcaccgatttcagcccttccttcaggaaagctggtaggactcattcaggttaacactgcatcggtgcaaggtgtggtcgcagatcagcaaggctgatttcctttaaaacctgctaaactgattggtccagtatacttcagtagaaggtgatacaactgttaattaagtaagcagttttgtactttgattagaatattgttgtatgccttttctcactggactgctgtacagtgttgagaagtggaattcctactaatgcagaaggagttttatgtgcccttatatatggggagaaatttagaattgcctctggagagtggttgcttaggaacgaagaaattgaaccacccatcacttaaggccagaaactctatcctgtacttgtgtcctaccttaggcatcatttttctgtgtttcgttctgttcaagcctcttatatagctgtggctggctgtcttggatggaaacccatgtcgcagtcctcaggggtggagtctccagatgggctgtgtacgccggccggccagcagccctgtctgtcatcctgtctgtcaggaactgagtgtgtattcgtgaggaacgctaatataaaaggcagctgtgtttaaggatgaggtcataggcaaaccatgcaccccctctccacagaacacagaaggatcccaacggagataaatatgcgtctggaggagccacaccaccttgcctgctgccatgcctggcttcattcactttgcctgcacctgcggaaagcaaacccgagagccctctatgcaaatgttattttaattattcatgtttaggacatatgaaaaacaaacctagaagggccatgtctagatgctggcatgccagtgacttgttatcttatctgtagagaaatccacatcgtatctagatacaatctagagatgaggggttttccttacaaggtaatgatcactgtccaaaggtgcgagagtaagtggcttgcccaaggtgtagacatgttaagtctctgggtcaaagtgcttaccacagtcacctcccttttcttggatggtggatctgtagaagatggaagcttcccctggttttatgtctccttttctgccactgtcctgtatgtttttcagattcgttttgttgttgtcgtcgttgttgttttgttttgtttttgttttttgtttttttccagtgcaagcctattgtaagcagtccctgtttatgggcagtccactagggggcagacatgtcctcattcactatgtcccagacacttggggcaagtcttcttacatagttatgcttcatataatggtttccagtttgcttttcctgtatttgaggtatattcctatctaaaagttcagtggtaattcctcagttcgttgacagtgtctcttgtttttctgttctacgcatcaccctaaaggtcatttatttattggtgactgtcttcatgcttagcattcttctgtgcctggggatattaaattctctccttcacactccattttgttgggttattgtgtgttgggctgaataaaattaatctgggagtagactgggctgtgagtgaggaccagaacctgagtcacacacagtaggtacagtggcctggaggccatctgctgagaggaccaagctgtgagggggtgaaaaggggaattcatgataaggacagtgctgtggacttttagctctggttattctttataagatgcttagaagaacgggccttgctgagacaggggggttggaggttcaactccagcctacactgcttagtagaacccagtctccaaagactgagggctggggggtgtggctcactgtgggggacccacctaacatctgtgaagctctgtctctagtagctcagtgtaggtgaccctcctagcatcacaaaactccgtctgcagccgaaaactccagcagttaggtacttgaaagcatgtgtgtgtgcatgaataaaaaccagatcagaatatggaaaatgttatttattgtaatattatctatattcacctcataacttatcagttttactattaatttcttcaaagtaaacttgataaagaaaacaatactccctgcagaacagtaactcagaatgttttcccaaagccctgggcaactttcagaaaggaaaagtacaccacagtaatttaagagttgcaggtatttgcagtttatcatttggaagtatacagctgagctgtgacaaaagattctctctctctctctctctctctctctctctcactcacacacacacacacacacacacacacgttaaaattttaaggtttcttgaaatgacagagggatacaatataagtcaacagtgtctgagcgggtatctcgcagtagctcactcactgatgaaatgctgagttggctctgccttagccaggctccctttgagatcccgctgagaacagtgttgggcttttattgggaatacttgccctgattcacctgagaacaccctgctcctcaggaacagagctagaagcttgatgtggtggtgcacgcctttaatcccagcacttaggaggcagaggcaagcagatctctgagtttgaggccagcctggtctacatagggaattccaggccaaccagggctatgtagtgagaccctgtatagaaaaacaaaaggaaacaaacaaaattacaggattaagagttcaaattactgtctttcacatgtgtcagatggtgtgtggggacttgcatatgtccattctccatggcttatctgtgtgtctctctgaagcttctgtgtggggaacgaagacagggcagggggcagggagcacagggatagagagtggaaaactacaagcaggacactccacagaggtcgggtcctccatcaagtacggggcctgagatttatgtaatgttagttaaagggaggcaaagtggcattcttcctatttgctgcccccttcccttgtcccaagtccactcctccttcattctagttaaacatcaacgatgacatatttaaagtaaaacagcaaaatgtgagaatctctcgtgtcctgtgggatgtctggagacatgtcacaaacccaaagccagccgctgcagtctgaactcaggggctatatttagatgactgtgtggatcctgtattttttcagtgctgtaaacatgttgatgtggttatttttagctttcacagaccttagtgaacttctgagttggccagcagacagaggcagttgtggctgttgcccgcacctctgtcaatggctctgattgtctctcagggtttccagtgcattcagagcttgtcagtgttcaggctgtctagcattaactgcccagtgtggttgtgtgtaggtgactctactacagtctggtgggcttcattttgttttgatgtgtgtctctggccatagttttgattccagttgaagatatatcaagcccactggtcctctcatgccctgaccctccagcattgatgacagattcttgctgttgtcattaccttcagtctgttgtactcttttcctgctgggcaaaggttataaggcggcagtgtggtaaagggggcaatggaaagctgacaggaaatgggaaggcagggctcagtttggtccccagcatagattggaccagctagtgtgaaaagaagtaattaagtagtcaacagcttttcttgatgaccaaatcatgctgtctctgctgcttacatgagtggaacattttcctcgaagagccatgcctggatccctgacatcgattagtcacttgagctgggccttccaagtttgtgttagagaattcacttccttctttgtgaagaggctgctgttctgagctctgctttgtacctggtggctggctttggttggataaggtcaattactttgtatggtgcaggaagcagttcctgagcgggtgactcgagagagcatgatttatctctttggaactacttttcccaaggaaactcataactgcctcataccttttgcctggaagccttaaactgagttgtacattcagaagagagtggtattgagcgtcatccagacttagttcatattaataccattatggcaatttgttttgaaatgttttcagtgattcatatgaaagtgatgtttttgaactgtgtcccaatttttaaaattatttgtttttgtttgtttgtttgtttctatgggtatgtttgtgtgcccagtgcatgcatgcccaccacatgtgcaggacccctcagagtttagaagatggctttcccctggagctggagttacaggcgattatgagctaccatctgggtgctaagaactgaccccaggtcctctgctagaacggtgtgtgcccttgactgacgactcacatctctggcacccatgacctctggttcttactgtagcctttacacattgtaaacacgccacaaaacaaaacaaaacaaaacacttgacaggaagcatgctttttgtattttgctgaaaactcagaaacaaacatacacattttaccacagaaatatatattttggatttggtaggtgaacaagaaatggaattgagaaatccaagggttttagcaaaagatagggttttttcaaatgtttttattatgtgtaattaatttgtatgtgtgttttttttttttaaagatttatttatttattatatgtaagtacactgtagctgtcctcagatactccagaagagggcatcagatctcattacggatggttgtgagccaccatgtggttgctgggatttgaactagggaccttcggaagagcagtcggcactcttaaccactgagccatctcgccagcccctgtatgtgtgtttttatgtggagccttgtgcacgtgtgtgcaggtccctatggaggctgggagagaatgttgtgacgtctgaagcaggaattacatgtgagcggtctgacctgggtgctgagaactcagctctggtcctctggaagatcaatactcactcttgactcctcaacatctttccagccagaagttgaaattaaaacaaaacaaaacaaaaagaatcaagattgctgttaatgttttgatgagctttttgttgttgttgttcattttgggcttggtttagttttgagacagggccctgtatagcccacgctggtcttagatttactctgtagctttgtgtgaacttttctggggggaaaaggggtctattcaccccagaaaagtaccaaccatgaactgaagatgtgaccctcccaagtctaacagggtgaaccagtgtgcttaattagggttacttaaaggcgtacagacactttgcaagcaggcaagtgattataccattgaagaaaacgtctctttctttccagcagttttagctgtcagtcagtctttgatgatgactgggtcctcaggagcccttgccgtcctctgtggctccatgttataggctcaggcctgtgtagaagcctatagacagtcacagctgccaagaattatagagggtaatggccatgccacagctaggagacagccttgtaagcatagagtttgaccttgaatgagatgcttctatttccatttcccaaatgctgagatctcatgcgtgagccaacatcccaggtgctgggttcatgctttctaggcatccaccctgacaactaagttacagcccagcccaggacagacaggggttgggatatattgctactggtcactatgtagaccgggctgaccttgaattcagagatctgtctgcctctgtttccaattctattggcattaaatgtgtgtgccaccacatcagcaccatttttttaaaatccccgtttatatagacaagtccattgttttcccaatagcagtggcagtaacccaggtggcatgcatttgtggtgcatagtaggcaccccagtttacagtcgagcatagtttaaacctcgatcattgtaggtctcatcctttggagccgggctttgtaacaagatgctgtctcgaacatgagttacagaattgtcatttcaagctgtaatgtccacatgacagcttcaggccacagcagccaaatctaagtgaagtcagaaaatcagctctctgtttgtgacagtcactaatgttctggttctgtcgctcagtgcctcctctggcctgtttgggactcatgatgatgcttgtaccctgtggctctgttcagccagattgcctgggtctctacctgggcgttcaacccacctctgcctttgaagccgtttgactttgtggtagttggtggtctttggtggccatcgttagaatccctcaccttccccacacttggctagcctgcttccatccaggccgagcatgtatgtaaactctgatacttcagaagttcaccggacagttgggagccaggagcctggagccaggcattggtctgcagttttttccagtgtattcgtctgtttgtattactaagctaaagttagcacaaatgggacaaggctagaaaatggtgcgcctggtttgaaaacaggaagttttaggcttctgtgtgtgtggaacagacggctgtaatgatagagctggagcgtggaaattcccacgaagcctgctttttcctgattttgctcgaggagagagggtaatactgcttcctggaaaacagtcgagcacacgttttaaagcacacggctcgcttttgtccttgttcacggataatttgtttttgtccatttcatttacacttggagcagtattttggaaatgtagtagttttaatggagaaagcaaatccctaggcacgtacttgatgttttcagacatttagacatctgagtgtatgccctttaactggcatagcctttgaagacaatgagagcattatggatgttggatgggggaggggagcgataggcttgtctattttaagtgtccccagctttgctggcttgtttgtttttaacccctgtatccagtcttcaaaaccaagtctctgtctaagccatttcctgactatgctgcatccagatgtatcctggaattctatatctgagagaaacattaaattcattcactaattgcagaggaacaaaatggcatttccaggcggaggcagcacaaagttctcactttatgtacaccatgcctagatatttttttaaaaatgtattttctttttcaaagcctttttagacataaactcaaaatatataacattttccattataaaggcaataaatggaagatctatgggagaaaaaatgaaaggcctgtataccttgtctgaatatctcatcccagttacagactcgtcatggttagcattgggttttacatgctttcagatcttttctctaaacttgttgacgtgcacacaaacataattatttcagacaaatggagccataccttctatacaactctgaaactttggttttatcgttctgtagttgagacaaggtctcagcagtctaggctggcctataattcatttgataacagcccaatctaactgaattcctgcaatcctcctgcctcagcttctcaggtaatgggatcacagatagacaagaaccatgttcccccctcccccttttttcatttaacagttatcttgcagggattatcatatatattttccatgtttttaaaatggtttgcatagtacacgtattgcataatttaaccattttcctgtccttgaacgttagtctaactcctgtcattaaaaaatccagtgttcaggttggagagcactgactgctcttccagaggtcctgagttcaactcccagcaaccacatggtggcttacaaccatctgtaatagtatctgatgtcctcttctggtgtgtctgaagacagctacagtatactcatatacataaaataaataaataaatctttaaaaaaaatccagtgttcttagtcagacatggatacacattaatcatagcactcagaaggtagaggctggcaggattacacaaagaaacactcttgaaaaaacaaataaacaaacaaagataattcagtgttctcactagccttggtggccaacactgcagtcctatcacttgggaggcagatactattagaggctagcctgagctacatgaaactgcctcaaaaggctaacccaaacaacaaacaccctatcatctttatgacagtttacagacttctgagatgatatgtaaagtttgcattgaatccatcagagaactctcagttcattgtttttccctacagaatatcaggtgtgtagtaccttttagtagacttcaaaacaaaacaagccttcctgcactctgtcctcaacaccttctcagggtgcagactaatgagagatctatcaccatttgcatcttgtcccctgaaacttggttaggctctggcaaccagtgagggtcccagagaattctccctagcttctgtaagcaagtggagccgtggacaggttctggagttgctgtctaccaagacacaaacgagcaggaaacagcaagtgcctttacaaggacgggacttgggggcttgctttattttgttttgtttgttgtttgtttgtttttgagacagggtttctctatgttcccttgactgttctggaacttcctctgtagaccagactcgtctccagttcacagagatccacctgtctctgccccccccccccaccagggccgccacctcagggctgagttgggggcttaagtgaaggtcttgacctggaatttgaaggaagttgatcattggaagaggaatgaagtgtgagagtgtggaggggaatgctcagaagacaacctggtttggaagatgcaaggtcatgtgccgtcctggaactgacacttggactgcactaacttcctatctctgatttctttcccagagatcttctaatcaagttcactggctctctgtggtgattttgatgggcagaaaacactagattgtctatatcaaggctttcaagaccttagtaatttgttaattgttgttgctgattcaaaataattggaaaggaaaggaaaggaaaggaaaggaaaggaaaggaaaggaaaggaaaggggaaaggaaagaggaaaggaaagaggaaaggaaaggaaagaaaggcccctcgtgcttcgagttggagaagcagttccgaggcgtttggacccagtgcagagtttggaggtcagctaccccacgtccaccgagcacagcacatgtatacagcatgatgcagttgctgctctgaaggaatcacttccctcctgtaaaacagaatcctctggttatttgtaaccacagaaggctcctagaacaagtgtatggcagagacagtggttttctttaaagctgaacatagcatcacttggggtaattgggcacgttctataaacttgctaattgcatatagcaagtgatggtgaggggctagtccaggtgggaattcttatgacagggctccatctgtcctttgtgacagtgtgttccagactgctaccctagtagctgagaagcctgttttcagatcttgccaaagtgtgataggcctgccttgagcttagcatagcctaatttgcttaagtgtagatgtgcttatacggaattcttttcaactgaagttcatagacacctcccaagtgtgtagaggttgaaagcaagttagttgaaaatttatggagcgctatcttctgacagttcttgagtaggccaggcaggttatgctcagaccagtgtccctgtgatgtgtaggtcatatgaggatgtccatattgtcctaacttcaatgggcatacctgcttcttcatcaatgggtgatacaagctccctggggagcagggggatgggagcggaggaaaggtacagagacaaggcttcccaaaacccccaagtaatttggattaagagtaccaaacagcatgcgactgggaaggacgtgaggatggagggtcccaagctagcttggggcaagctagttaggggatggttcagagaggaggactgagctgagttcggggtggcttatgtgctcagaatagcatctgttacagggccaaaggcggaaaagaagacacaccgaagaggatggcaaacctttgaggagatacaggttgggttattatgaatttgagctctctcccatgtagacagcagacagataaccagtaagcagagggcaccgatatcagaggatggtacatctaaagattcactaaagttggtactacattgattattgggcttgaaactcgagtcattgttgtaagacatgatggccacaccgtaagttgttatgtaattttctcagctaaccttatggatactgtttcattatcatggaagtctaatagttaaaatggtttttcatgagatttttatttaaagttgatttgagcatttgctttgaaggtttcaagaaaactcatctgctttgactgttactcaagcaagactgggaggcagtgtacagctgtctctggggctcccgagacagcagggtaaaaataggacaaactttaagaatcccagatattctcagataacaaagactggtttattggggccttttttgtgcttggacaaaacagagaagcctttgtgctgtgattagcaagggtgctgatgacagatctcctgtcaagcatcaggctttattctatgactaaatggtgctttgtcccgccatccagagaacctttgtatgtgccttgttaaagtgtgagtttatgtaattgcttttgtttttcccgtttcattggtgccagattcaatgagagtgactcattttgtgaccgagacaaacattcacatttagaccatgttaaaaataaacaaacaagaggcaggtgctgcctgcctcggttctgcatctccgggctgctgtttcctgtctcaggagttcaggtctcaggtagtggctactactcagctcccgtggtcactggtccactgtgccccagggcagtttctaaaggccttttggatgttggtgacaggaaggtccaaattaggaaatctggttagatgggaagtagaaagtgatgtgtacagtgtctcaaaggcacacaggaagacgacagtcccagtctcttctggctctgtagttttcccaccacacagcagtggtttggagcagttactttacatgtgtttttcacacatatgcctcattcaggggctctttttctcacagagaagacgtttggaaagcactgatcaaattttaatgagaccatggagtgcatttaatagtccccaaactgtacaactttatttcccttgggaactctgaaggtggcccaggaaggaaaggcctagaaggttgggaaagaaaacaatgggtttttggaaagagaacatacgaagagtttggcctcccaagacagacgtgatagttgatgaaaatgtaagggaggacgggtagaaagttcgcttaaaggattgtaggcagagtgggagagatgttcgcttgagaaagtacttagcagccaagtgtcgggccttgagttagattccccagagcacatgcaaaagagctgggcatagaggggtgtgcttataaacccagtcctggaaagaaaggttagcagaggtagatcattggggctcacagaccagacagcctaccctccttagtaagcgccaggccagtgagggaccaaactaaaaagcaaaacaagatcaaggttgagcatgtatgtgtgcatgggtgcgcacactctctcacacacacacacacccacacacacacacacacctataatggttaggtgaactgggcacacccagcagtgggctggttcggtatggggctgatgaccctacacagctcagcagccttggtggccctcgatgacttgcagtctagagattgacacctgcaccactgacccgagccactggggaatggatgaattatgttcaatgaattatgtagtaaggcatttcagaaagatttccttgcgaggcattaaagttttagaaatcatttctgtatttaaagacagaacctcttcaatctggggggtggagggcactaaccagagaaaggctcctctgcataaataatactgttttctgactttctgcttctccgttgctgtatcaggcttaatacttatggatgcctttataggtctcagggcagagtcttatgtgtgctaccacaccttgcaaaaggtgataaattttctacaatggctgttgttcatttgagttagatgaatggacttttgtcatgcagtatcatgtgtatctataatcttgtgacttcccagtacatggaacatccacagagctccatgcctttcttcttggccaccttcgttacttcctttgagcaggactaggacagaggttgctggagcctccgttgccaccccagaccctttggcacatccctagcaccaccatccaaatctacataaaaaatgcagttagtgtggaggctaaacccaaagtacgtgctagagaaatggcaagtctgtggtgctcggcagctctggggcactgccatgttgcctctgctggctttaaacagtaggtgctttctgatgagcacacaactatctatgggtgctgatgaagacacaggaggtcttgagttagggtcggctcaggcttgaagcacaagcatgaagttcactcttggtctgatgagaccatagaagaccaaactcctattggatgatggacagactctgaaaacactgtaaacccaagctgactctatccccactcgttactgagggacaagcactttgtataggtacagttttctaaaccaaatcattgatgcaatttagtgtggcgctaggtgacatgaactgtggccatgaataatgcccccgagagctacggaaactcgtatctctgtcctcccagctcacagggcgccttctttgcatcacctcatctctggtgttcattctggagcgtcagtgtgtcttagaaggtgaccaagacttactgcctcttaatatttagctgtctatgccagaaaaaatcactcaaagagcagtgacgcttttgggggatccagggccatatttgggggtataaaaggtgactagactgtcagccacctagacctgctttacctaatgaatatagggtttaggaaaggtggctgtaagcaatgttacagcctcctctaaaacattctttttaggtttaggtatttaagtttatgtgttacatgttttgccagcatgtatgtatgtatgtatgtgcatcatatatatacactggtgcccttggaggcaacaagagcggttggatcacctggaagtggagttacgggtggttgtgagctatcatgtgggtgctgggaactgaacctgggtcctctgtaagagcagccagtattgttaactactgagttacctttaggataactcagtcctcagccctctttaggaatggtattaaagatctagatgaaggaactattgagtatagatcccgattgcatgcatgcgtgtgtgtgtgtgtgtgtgtgtgtgtgtgtgtgtgtgtgtgtgtgcacatgctaggaagagacgcatgacaattcaggaatacagatctctgtgatttcacaacagcagactggccattagagtgatagctcattgctagcatctcagggaagcaaccaggaaaacatccaaagcccgtctctccctcccccatcgtgtcactcctgagaaaacagaattctacgttttaatgtctgtcagtcttatgaagaagcaccataagtgtattcttttgtacctaggggtgggggacagtgtgtgcgtgtatgtgtgtgtgcgtgtgtgtgcactcacacacgctcatggaggctcaaagaggacatcaggtgacctgctctatcttatccctttaatacagaggactgaacacagagctacactggtggccagaaagcctcagcagcccttcttgtctctgctctgtgtggcaggagaaagagaagcacatatagccatgttcagcttttttatgtgggtgttggggaccggatggagctcaagtcctcgtgctctcatggcagcctcttcctactgagccacccctccagcccttctttgacatgttaaactatggaaaaccattttttaaagtgaaaaataacctgcagcttaaaattttccactaattttcagtagccagttaagtgctcatacattcacattgttatatactttgaccccttctctagaactagtccacagtctgtctctggatttagctactgtaaacggttcatataacaagacggcagtatctgccctttgtggatggcttctttgtcttagcatgatatctgtccttgtcctttggctgataccgtttccccaacgttactcattaaaatgattttatatttggttccatttgctgtgtcataagagaactgagacaagatactacaactttttttttcagacagtacattcataaagttagcttaacaattgtgctccaccacagaatgttttgacctgacagccagtggctatttcacttgtttctaggcgtggaagagaaggtggtttgtgttgcgcagtggccgtttgactggagacccggatgtcctggagtattacaaaaacgatcatgccaagaagcctattcggattattgatttaaatttatgtcagcaagttgatgctgggttgacattcaacaaaaaggagtttgaaaacagctatatctttgatatcaacaccatcgaccggattttctacttggtggcagatagtgaggaagacatgaacaagtgggtccgttgtatctgtgacatctgtggattcaatcccacagaagaaggtacgtccaaggttttgttttgtttacatttttaaaaatttattatatgtgtgtgggtattttgcctgtgtgtatgtctatgcaccacaagcattgcagtggctgtgaagactagaggtggccaatgaatcccctgggactgaagttacagatgttctgagtggtcatgtgggagctgggaattgaaccagggtcctagaccttttcagcactaatccatctctccagacccagagtttaaggttttgttatccagttagtgcaatcatttttctctttttttgggggggggggcggggcgggaggttgtagttttagaaatggtacaaaattgttatttcagttatatgcatcaatatttttcttttacaatcggaatttgacattttgagcaggcactgaatgcttcaggcagtttagagagaaatgctacaggttttgagagacttaactgatatggaccagtctaaataactgtcttcgtgaagaatttggggaggggagtggcgtgtgtgtgtcacaatgtgagtgtgggggtctgtctgggtggcaggtgctttacctgcagagcaccttgtgccataggctgtgacatacacaggctgtgctctcactgctccccacagcccacccctccccagcttgaaagcagcaggaacatttttaatagcagaactccatagtccttaaaaatgggtgaccaatatatttgggtactttgtgttttcgtaatcaagtatgaagggtagaagacagtgagctcatttataaaccattattcaaatatggaattgtggtttgtgagctggacaccagaacattgctaatcacaaaccctttgtatttggtccctaaacaacaaaatccctcgtaatttcaatctccccatacttcctacagcttataaactatatcaaagtaactatatctaagaactatatgtaagtaatggctttaaaatcagccattcctcatgcatttgcagtacataccttcactgtatctcaagacagatgtggactctaaacagcagagcagagctttgtagcagtaatccccaccattccatgtgctagagtgaaaaccgggatgtttgtgcactatgtgggtgcagtgccagcagtggtcagaagagggcatcagatcccgtggaactggtttacagacaggatttttgttggtttttttaatgtgtgggggtattttgcctgcatgtattagtgtgtgtcacatgtatgcctggtgcccgaggaggccagaataggatgctgggatccctaggactagagttacagacagttgtgagctaggtcttctggaagaacaaccagttctcttgaccgctgggccatctctccagcccctctatcagcaattttctattctcttgtctccaaccatccctcataactactcccgaaagagcaatggcttccttggcctttgttaggtctgtctctcaggcatgtgctctccctttccaagactgaatatgcagtgttcttgtttcaacagttggctgataccttgtgacactttttttactatttgaatttcaagccagatgtgggaagaaatagactctgcttggacagcactgtctgagaaaatcagtctcccgatccctctgagaataactaattttccctcaaaacaaaaggaaaggggaaaattctgacctgtgttttgattccaggaacctctcaaaatatcattaccatgttatttccgctgccccaggtgaccactgctattattgaatactcggaacgctggcaggccctcctgtttttaaattctagctcactgaactgtgtgcggttcctgctaaggtttttctttagtggatttgggggtagaaactggggttcttttgtttttcttggaaatgtgcagattgactttttattttggttcgggctcaccaaggtggaagctgttaaatttgctaaacaagcactaggaagcccagccagggctgcaggaagctcactgacatctagcaaaacctctgggctaagtttagggtatgagcttaaattgcttttctcagagtgtccagatcatggtagtttaaattaaaagaaaatgcaattcccgatttgaggttcttgcctttagtaagataaactgatacttaaggaaaaaatatatagactgagaatatctcagcagtgtgtttgtctagcgtgtacaaagctctgcgtttgatcctcagaacagcatagatgtgacataatggtatatgcctgtaaatgtcagcacctaagaggtggaggcaggaggatcagaagttcaaggtcttacaaacatagaagaccgtttctcagaggtggaaagaaagtgtagggggttgggtgggtacaaggatttcatcttttctataacacagtagtcaccaagggcttctaaatttcctttgactgagtctggagagatggctcagacattaagatcactggctgctcttccagaggaccccgggttccattcccagcaatcacgtaacaacttaaaactgtctgtaactccagttctggggactcaatacctccttctgacttctgcaggcaccaggcaggtacacagacacacatacaaacaaggaaaaagacaaaacggaaaccaaataaacaagcagaaacccgcccttcacataaactaataagtaaaatttactttgagatttttttttttacttttttttttttttaatgagacaggattcaaacagaggttctcttgcctctgcctcctgggtgctggaacttaaactgtgcgtcgccacgcccaactctttttacgtttttattaagacatccactattactattgtgtaggcatagatgaccagtgcattgcttagaggttttctatgtctacatttgtacatggatatacgtgagtgtgctttaaaggccaagctcagatcaagaatttcaggattcacattccagcaaagaatccttttcctagagaaatcctagagaaatttcctagagtagatttgggataattttgttttgtttcattttaagatgtatgtatgtatgtatatgagtacaccgtctcgctctcttcttgcacaccagaagaaggtatcagatccccttacagatgattgtgagccaccaggttgctggaaattgaactcaggagcagtcagtactcttaacatctgagccatctctccagcgggatagttttaacttctgtccccagtcatgaattttgcctgttttaaatcctctaaaaaaaaaaaaaaaaaaaaagaaccatggagtctggcttacctcttccataaaagtcaccatgttgaagtatgtggtgggtttttttccccatacagcactccctcactcctattactctcatacaatatgggtctatttgaatatcggtaaatggacatttcagttgttctacaaaggtctgaccattcttacgtgtctttttacaacaaacaaacaaacaaacaaacaaacaaaaagatccttttttagtgtgtgtgtgtgtgtgtgtgtgtgtgtgtgtgtgtgtgtatacaaaggtgctagggaggccttgaatctaggattcctactaggtagttggaagctgcctagtgtggatgtcaggaattgaactcagctcctcccaagagccgtctctctagtctgttttgtctttggatagacattagctcttagttcttttggatacatgccaatgagtagaactgccacgtcatagcgtatatgcattttagcatttgtaaaacataaatgtcttcaaagccattgtaccagctgctgtcctaacagtgtatggcaaatagagttagcccatattgttagtgacatttggcattagtcagtggttcatcttggctttcccagtagctgtgtactggcaagttcatgatttattttgtgtgggtttttttttttttttttttttttttgaaaagcagttcaactagaaagattatctcttctgtttggctttcttgcaaagttttagttgcgattcagtgggacccctgtggtggggtccaagctcatagaaccccaggatttccatgccatagagctctggataaaaacagtgctgtttgtcagcatccccgaaggattagaaaggtatttgaaatgtgtgagggacaagaagcttggaaaattgagacgtttgtacttgaaacccagtaaacaagttgggaagtgcaggcattcagggtcttgcctggctgattaacagtggaggcggcggcagggtgcctcactgacagcagctactactgcagtgtctatttattatccattcattagactgattgaccttttaaatttcatatatgtatggagagagacagacagagacagagagacagagagagagagagggagaaagggagagagagacagagaatgcgcgcgcaagagagtgcccacttgtgtgggggtcccaggataccctgcagaagttatttctctccttccaccaggtagctcctggggactgatctaagatagccaagctggcaacaaatatctttacccgctgagccatctcactggctcattaaaggtttcttatcataagttataggtttgacatgacgtttccattcacgtacgtaatgtattttgaacgtgttcaccaccacacaagacacctctcttctcttgccccctattcttgtggagcccttatacatacctttgtatatcacacgaagcgtgacatacctaagtaggagaagccaatagtagggcgagggctcctgtgagccagttcacttgtggatgtgctcatcacctccccctgcactgaaggcttgcctgctggaaggcctcgcattagcttattagctttctaagtaagtttcaattaggagtttgctccagtggcttattaggcctttaatggatgctaattatactctcggtgcattctgagttaagaattgggaaatgattttacatgtgtaagcaaaccttgagccagtgtttgtttcttagaagaaacttagagagagcagtaagtcagaaatcaaaacaggactgagaccagaatgatctataccactgggcttgtcgcccagaattggctgaagtcccatgcctgtaaggccaagcaggagtctactttgggccagtattgactctcgcaggaatcttaaatttgagattatttagacacaattcaacaaatttttaaatttacattatccacgtgtgtgagcgtccgtgcttgtgttcatgtgtgccacggggcatgtcagaacgatatatacttctctccaccctgtggttccagggaatgaactcaggtcactggggctgtggcatgtacccttacctgcggagccatctcactagctctgcaccatccaatttttatatccacatactcagtaccaggtagatggtcggctcaagacagaatgctgaagatggtgcattttccaggttaacacgctagcatgatctctgtactcttaaagctactgcctgccactgtcacttgggtgtttgggggtacctaccgcttatgtctccacctttatgaacttgcttggggttgtggtggaattttaatttcagctcttgcctcttgaagacataggtgagtcctgacatgctgttaagcacagcattttttttttttttttgaaacaggcccttctgagtcccaggcctgttttcaggagattccactgtctttctcactcctgggtaggaaatctgaaaggtcagaggtgaagctgctctatctgtgacagtagaacaagaccggggagtgcgagtctctgccaggacaattttctttttcccacgagagttcctcaatttattattttatggctgtcagatgtaacaaaagaaacaaattaaaaaaaaaaaaaaaaacaaaccctacaaaacaaaacccgccactgaaggaaagtgtatctgtgcaaaccgtcatcactaggcgagtcagaaggaggtcctgggtgggctgcagttcacggaccttcactgagggaactgtgcgtctgcagcgtttggttttctttccaactgagcgctgagcttggttggtggtaccatgcatgtagctgaagagctaacagaaagcaggggccacgcactggggagagagcttggagatgtggtagctgcttccccatttccctgctagtgctggctggggctcttgagctcatctttgaatagtaaatattttttcatggttctcttaaggccagaaggatatagtctgaatcattatttaatctgcagcatttgaaatcctctgatgctaaatccctgtattagcaactggatctcgagttgaacgcgttgtgggggcagcttacctcactttataatcaacctctcctagacacagcaacaggaacttaagaggacccactgaaattcggacaggatgtagtaggagtggtcccaactgtattttctgcttctgtcttcctcctggcaaagggtgttaaatcatattagagaaatcgattttttaatagccatttcatgaaaattcataaattaaaagttagaactcctcttggtctaaaccaaggagattcacagacctcattagcatagagcaggactccaagagatctcaagcaaccagtccaaggctacacatgtaggcaaatgggcgtcgaggattttcaggtgcctcctgctctttaaaaccctcttccagtctgacaaagtgagcctggatgtgctgcccagtagttgaaatgtctccctgcccgtcccccaacctcagctacacgtaagagagacagttatgaacacagcttcctgatcatccctgaggcctgtgggcagcacgatactgttctcctcagacatcacaattaagatgtgccctggatactcctatctgaggggaagcattgtaaagttggccgttgtgaacatatgaatgaggtaaacacacaaaaccatcaaaagtgtgcagattgctctaggaatccagaggagggtcagttagaaggccaaatggctggtgttcagtcagagttgatggaccatccaccccatcataccttttagcatgttttacgtattttattgtttaaaatctgctgttcaccagccttctctgttcactcttatgaccttatatttctaaccagaataacagatcatagtctatcagggccgttaaaattattctttgtcatgtcagaaactacagagggactttatttctagctgtacaacttattttctagctgtaagctgcacagtttatttgttttccttcatctttggaacatgctcaagggatttgtgggatttttggacaggtgtagttacaagctcggggaagggtctgacgctacagatgagcaccggattccccttggctcagagttagagaggttttcccaataacccggtaggcaaacctgaagagcagatccaggcactcttagcagcattgtggccatcaagtctgtcggtgtaagtgtgtctccttgctaggttggcgtaacctagggaaatgggggaggggggaatccaaaacaacaaaacaactgtctcttaggactggagagatggcatagtggttcagagtactagctgttcttgcagaagacccaggctccactcccagcccctacataataacgcatgaccatagtaactccaattccaggggactctaatgcccccttctggcctccaagagcaccaagtacacatatagtgagcagacttatgtgcaggcgaagtacctatgcacattaaattacgttaacattaaaaatggtgcctactaagatcgtaggacagtcttattttaatttaagtagtttcaaaactcagtatttttcagggttgcattagtgtggcctcactgggtgtagatctgggtctgggtgtttgcacatgagtgtgtatgcttgtggaggctggaggttggggtcaggtgtgattctctatctctgtccatgtgagtcaaagtcattgtatttggagcttgttaagagggttagagtaggtggccagtgagctttcggggtctgcttgggtttcatgtaagtttggggatcttagctcgagtcttcctgcttatgtgacaggcgcttatctcctcaggccccatcttgatttctctcaggcctctggactaaaggaaaggctgaccttcttcagatgtctttggcaagagttaattaacatataaccattgcgatttaggtagtatttctttcttagttcaaagctatcatctcgttctttttgcccagattggccttgaactggtaaggcgagcatttcagtcttcagaatagctggcagagcaggtgaataccactgcccatggcctcaggtagtgtttgtttcagctaacactgccatcattgattctggttatgtgcattaaaacaatctatctccagactttcaaagtagcttagtctaagaacaacagaatcttcaactgtgatagactaaaacttaacttgattacagatcctgtgaagccgctgactggctcctcacaagcacccgtcgattcacctttcgctataagtacagcaccagcctccagtcagatggaagcttcttcagtcgcgctacctcctccttaccaggtcatcagccttccgccacacccagacaccctcggcctccaggacgatccacaagactacctcttgctgatcaactgtcaaagcaagaagcctgaacctaacaggtacatggtacatgctagcgcatgtgcgcacactcacacttgtgtgtgtgtgtgtgtgtgtgtgtgtgtgtgtgtgtgtgtgtgtgtttgtgtgtgtgtgtgtgagtgagtgtgtgtgtgtatgtatgtgtgtgtgtgtttgtgtatgtgtgtgtgtgtgagtgagtgtgtgtgtgtgtgtgtgtgtgattcagatttgtgttgcaggtttataatcctctgttaatgatttctgttatgtgggaggtattttgttgttggcactttctcccatcatggctgatcatagttgtgcctacagggctgacttggaaagagtctcgaagtctttgttagggactcacagcgttacttgcttgacagatgtcactgatttgtaaatggtgaccttgctccatttcttatgtgattgtaaagcagccaagggtcatcttttgtttctgaagaaggagaggagtacctactactagaagattttgaaagcaaagcgattccattgcagtgagtgtgctgtagttgtggaactgtgtgagaaactaatcatacaggtaaaatcccattatggcaaatcctagaggctaggcagaccaggaggcaatgacatttcatgaaatcaaatagactgctacaagctgtgaacctttcaaaccttcctccccagccatggagcagtgctgactccaagctgtgacttacaacttttaaaatagatatatgtggggtgtatgcctgacccagagggtccaaagagccttttccagatgcttggtagagggtcatcaccacacacacacacattcctgtgctaagcttgaagctattttaacttggccatctttggcatttgatagtgaaaagtgaaaaggcataagtaagtggcagaggatattgaaggacagttactttatcatttgaagaagcaacaggaaagtgaagatcaatatacaagctagtgtctgctgcttacaactcgtgaccattggtgacagcaccaacaactggaatatttttcactgtgcaaaaatggcaatgactcccaaggaagatttataaaatatggtgttaaggagttaagctttatttttaataacaaaagtgtttcttttctttggttaaaaaatgattattagttagaataagattatagagtagttgtttaaaaaatgtatgtagaacttaaaactcccagaaatggtttctatgaccccttccaaggggcagtgagtgaaaggagagagacgacattccatggatggttttgtctgtttgttataatggtattttacctgtaagagcaagaaaattgtgtaagtcaacactagttaatactatcaaattctaactcaactgtgcctgtttgctgtgagcattgaggcagcacacttgtgggcttgcgccctgtgtgactaactgattctttcctctgtggaaactcactgttacttgctggtgtggttgtttttgttttgttttattttgtcttttagaatccaactgatcagtgacaatgtttggtgtattttcttcttatgacagtgcctttcattgattttgctggtacaacaccattactgccacaggagaaattgttctccaagttactgagtagatactctgctgcagtgacagttaaataacaaatatttgtaaagtccctaccacatgcccactagtatgttaggtgctatgaagatacaaatggattacagtcccctgagattcagtcaccctgggagctctcaaagtaaacctgctcaagaagccagataaactaaccatttatatatgttatatttatatatgagagcacaggggacggttgctcacacatccttctccaccatgactcagctcatatacatgccccttcaggaagcctgtctacaggcttacattgaaatgtccctctgggttgatgaggttttgtttttgttttagtgtgtgtgtgtgtgtgtgtgtgtgtgtgtgtgtgcgcgcgcgaatgtgtgtgtctgtgtctctgtgtgtgtctgtgtgtgtctgtgtgtgtgtgtgtgtgtttccttggaggaactcggcatgggcaaatacaggacaggagttactgagaacgctctggcagtttggtggtggtagttctgctggtttataattataaacagctaaagaacatttgtgctttttgaatcttaatggaccacaaacaaacaatcttaacaaagcaagttttgattgctgagctgcagtgtatatgttgccaaaactgactcgactgtggtttggtttttgattttggttttttgtcattcagaaccctctttgactctgccaagcccaccttttctgagacagactgcaatgacaacgtcccttcccaccagactcctgcttcctcccagagcaaacacggaatgaatggctttttccagcaacaaatgatgtatgactgcccaccgtcccggctgacatctgtctcgggagagtccagcctctataacctgcccaggagctattcccatgacgtgttgccaaaggaatccccatcaagcacggaggccgacggggagctgtacacctttaacaccccatctgggactgcaggtgtagaaacgcagatgagacatgtatccatcagttacgacattccgccaacacctggcaacacttaccagatcccacggacatttccagaaagcacactgggacagtcatcaaagctggacaccattcctgatatccccccacctcggccaccaaagccacatccaactcatgaccggtctcctgtggaaacgtgtggagtcccacgcacggcctcggacactgacagcagttactgtatccctcctccagcaggcatgacgccctcccggagtaataccatttccaccgtggatttgaacaagttgcggaaaggtaaagctctggccggttctgctctttagggggtcagtgatagaaagtctgtttccacaaggcttaatgagtaagagccttttctgcccaagtatagcacctacacttagatcctagcatcctctcaggtttctgatcctagtgaaatgtatgggacggagacaggggggttattggtacttgtgtgccagcctacctctcggttcagagaaagatcctgtctcaggagaataaggcaaagtgtgatataggaggacacccaatattctcccctggtgtccactcactgtgaaggcacacaagcaagtaaacccacatacatcacgcacatacatacacatgcaagaaaagcaattttctcagtaattgctctcttcagcatagaatggtggtgaagtgtatttatcctttcttcacctctgcagcccccacacgtgtagccatgataccagaatcagtagatccctgtagggtgtgtgtgtgtgatcaggggggctggtgggtgtctgtgtgtgtgtctgtctctgtccatttgtctgtgtttctgtgtgtatgtctgtatatctgtctatgtccatttgtctgggtttctatgtgtatgtctgtatatctgtctgtatctgtgtgtgtctttgtgtgggagtctgggtctatgtgtctgtgtctgtgtgtgtgtgtctgcctgtgtccatgtccgtctgtctgcctgcctgcctgtgagcatacacgtctgtgtgtctgctctgttagaagaaaaagctggatcctctcatgcctgaaaacgtgtggtcttacggcttcctacctcggttctctcccatttcctagacttctgtagaggtgggctgtctgaacactcctagtgatgtccttgcctgtgtctgtgtgccaccatgactatttctatgtcatatctccagggttttccccttccttccttgaccagcagcttttacatttttgtcttcataggcagcgatgctgttcaagtcgagccattgtactttgactttttcaatttttagagcactgcgtctctcctctctctctcttcagcttagctgacagtgggtatgcctgtcttgtcccataaagcctgcaaacacacgctaaagacctcgggagtgtgggcttggtctagcttaatcctcccaagattctggaatttttgtgcagtataaatactgtgtgttcagcatattgtcccatctcctctgccttctgtttcctccatgctccctgttcctcttagttcccttcatctcctagagagttttgtgtctactttcatattaaatatgattttatgtatcaatataaaatctagttaccataaaatatctttgtctctatgagattagcttaattatcttaattatctcatgttctaccttctagcaagtggtatgacttcattcttcgttttgttttgcttttcatctttatttattagtttattatgtgtaggaggtcagaggacaacattcaagagttgcttctccccttccaccatgtgggtcccagagaacaaagtcaggccatcagacttagcagcaactgcctttatttgctgagccatcaggccagcccaaattcattgttctttaagggtgaaagaatccactgctataggtgggaccacactttccttaccctgtcttctgctgctggaccctctgttggccgctgtctagtttagctgttgtgagttgtgctgaagcaaagactgctgggcacgtctctgtgatctgtcgctctcaagtactcagggtggtagctgggttgtatggtagatgtggtttcacttatttaatttttaggaaacttccataatgattttcctaatagtttgtctagtttatgttcccacctgcgatgtctgaaggtcctcgttctcttttatccttcgcccttgccagcacttgttaggtttttgctgctgttttatgtgagcgaatgtttgtgaggggcagatttggtgtggttttggttttctggttttttgtttgtttgtttgtttgtttgttttgtttaatgaccaacattatgactgggataaggagaaatctcagtgtggttttggtttgcatttctctgacagctattgaggttattaaactgtgtgtgtgtgtgtctgtgtgtgtgtgtgtctgtgtgtgtgtgtgtctgtgtgtgtgtgtgtctgtgtgttaatggccatttgtattcctttctttgggtgctatatactcctttagttagcccatttactggctaggtagttttcttatttagtttttaagttcattcttgctatgagcgccatgttgggtgtacagctggcaaaggctctctcccactctgtaggctgcttttacttggtcactgctccctgcactgtcatttgtaatttcatgaggtcttgtttgtcagctgttggttccatgtgctggatggccgaggtcaactgagcgtgtgcattgcctggcctgtgcttctttcttccccagccacttctgagtttcaggtcacatccctctgtaaggtctttgagccactggagttggtttttggaggatgaactgctgggatctagtatcattgttacacagatggctatccagtttctcactactacctgttggagaggccatgtttctccgatgtgtatttttggcaacgttgttttaaaaaaaatcaggtattaagtgcacatgccctaaaatctgtgtattagcatttctgtatcttgtggtagagttttctagctgttgcaaaaaaaggcaacaatagaaatattttatttggtatatgttcaaccctctaatacctatttgaaattgtctattccttccttctttccttcctgtctttcccctccctccctgtccttctcccctccccactcccttcctttcaccttgccacaggatctcatgtagccctgtctcactgtgtccctgagggtgaccttgaacttcacacacacacacacacacacacacacacacactgctcgttgctgcgatttcaaagaggctaaataacctagttataagttagtggctcaaaatggatatcatttcttttttccatctttagataatccttttcctgccaggcttggacattcggttgctgtcatagtcagatgatgacattggtaaacacgtaggtgtgtgcttaacatgccagttagagaccctgcttgatgagtgtgctttcagtgttaacagatatgtgttcatggacaagtgtgaagagagagtaccttcgagctggtaacacgggaacaaaagctgactttttttttcttaattccagatgctagttctcaagattgctatgatattccacggacctttccgagcgatagatctagttccctggaaggcttccatagccagtatgtaagtacaactgaccactggccctgccacgttctgactctttagacttagtgccccgtactctatatgcgaccatgaaatgaaagtaactacgggttctgtagatacaggcgtgatacttgtgtgtgacagtggctttgcttattaagagaaatgtatgtgtgttttagaaaatcaaaagcgtgttgacagcgggaggtgtctcgggtgaagagctggatgagaactacgttcccatgaaccccaactcgccacctcgacaacattccggcagctttaccgagccaatccaggagccaaactatgtgccaatgaccccagggacctttgacttttcttcctttggaatgcaagtccctcctcctgctcatatgggcttcaggtccagcccaaagacccctcccaggaggccagttcctgttgctgactgtgaaccacccccggtggataggaacctcaagccagacagaaaaggtaagggggtgtggccagtaaaggataaggtggggacatgcagttagggctctattaaccataccaaaacatgaaactgtttaggctggcatgggactatgctgaagcactttatatagcctgggtccttaacttaagttcagaagtcctactattcgtaaatgaatatgttgatgtccaggtgggatttccaggtctcctcagacctacagtagagcttacagactaagaatgcccagagcaatggcagcagcaggcaagcactaggagaatctggaatgttcttcccagaggatataggtagagctcccgacccctgcctgactgtcccctcccctgatgtatgacactcacacatgtcaagagagacctgaaatctcaggttgtatgtgtgtcagtgtcttgattgttttgttgttgttaatttctgccaactgttttgcttttgtaaagcatagcaaaccaagcttaacactagatatgaccttgctttgctactttgtatattatcaaattagattccagataataatgcacttgatgtggttatttaagaatagtgaagatgtctattatagcctttctctttccccacatcatgactttaaaaacacctgccttggctccaggctaagtggaagcttctatggctctaattctggatgatgtaaggaaagttgacttctgaagcaggggagctagtgaggcctggttctctttgtcaaaggaagccttcagccactttgggtaatgtctcctcaagttttaaaaacttaggttcaagccaggcatggtggccttagcttttcattctgggatctgggatacagaggcaggtaaatttctgtggttcaaggccagcctggtctacacagttctgggtcagccagagctgcacccatctccaaaacaaaacaaatttaggcttaagtcttttaaatgcaacacactgtgctcagcacaccactagtgtgtggcttagtcttgataaccaactaaagttagagttgtatgatagaatgatggatttctggcttcttgcagagaaattaaggtcatttgaaaagccacgtgtcatttatagcttttttcaggccatgtaatgcttatgcaaacttattaacctgggcttaagtcattaacactaattatgttgtagttgtgggagactcaggtttggttttattcttacgtaagaaagggtgtatttctgctgtactcaatggtaatttgtggtctttgccctgtgcacttgtcttgtgggacgtctctgcatcttctctgtccgctccctttcttttctccttccctccctgagttctctcccttgactgggttctgccccctttggcctgcagcacttctctgtggcctcagtcctcccgcctggatccctccttggcccttgcccgtcaacatctgcctctaatgcctcctccgtcattttcaggcttcagattcttagagatcacttgagtggtccaggttatcccttcacacagatgcctggctcctgttgggacagacgcccacctttggtctcacacagttgagaatgaccccatgtggtagccgtagactcccagacacccatgcttcatggccaccatctggaattgtgttagaaagggtgtgagtgccacaggctttttgtcccttttgtttgtctttgtctctaactcaattagaaatctcactaattgttttcttcttgacataaaatgtaagtgaacatgaagagatctgtaattggtccaagggtctctggaagatcaatacacatcttgtagacacaaagtattgaaatcttttttattattttttttttattttatttgtttctctgtgtagctctggctgacctggaacttgtctgtcagaccaggctggcctccatctcagaaatccacctgcctctacctcccaagtgctggtcccactacctggctttgagatccccttttcaaaagttaaagcggcatgttatttccatagaatagaacaaagtaagcttggatcgcgtttggagacagttattcttccaagaactaggcaaacttgaaatgggcaggacatccatccccagcaccacactgtgatttcatcggccagacactttatttggcctatctgcttagatacatgatgaacggacaaagagcacccaggggactacatccagggacagttttagccaaaggttaaagaggccattgagatttagcgttagtaaaggggttttacttttctttcgtacctttaatttaaatcaataggattcatgggaagaagcctgtgaaggtgtttgctgcatccagaatactgtgcctgggaaagtataactgttaagaaaagcagtttagggctggagagatggctcagcggttaggagcactgactggtcttctagaggtcctgggttcaaatcccagcaaccacatggtggctcacaaccatctgtaatgggatctgatgccttcttctggtgtgtctgaagacagctgcagtgtgctcacacacataagataaataaacaaatctttaaagggaaaaagggagggagggnnnnnnnnnnnnnnnnnnnnaaggaaggaaggaaggaaggaaggaaggaaggaaggaaagcagtttaaaacccagattccagctggacagggttagcactccagaggcagaggcagaggcaggcagatctctgtgagttctaagccagctagggctatgcagtgagaccttgtctcaaagcactaaaaagaaaatctaaaagctgagattaaagtctcacaactaaacttatccttgagtctgtgtgagctgggagcatgtgtcccattcgggccacgagattgttttccctcggtgtggcaagagatgagagttgtacctgcaaattcagtgagtctgggtaaattacttgagccgtcctttcagtgtcttattaactaattcataaggaaatgcgattgtgccaggtgtgcctggctcctctcagagcctcagccagctgggtgttggtttgtttgagctgctctctttgagagagtccatgacaaatagttggcagcctcctctcggttctcccgcagttttatgtgccctgccacagtatacatgtggtgctggccagttttcagacgcttcccacatactgaggccacagaagtacagaggtgctgtgtgtgcagacgcctggcgtgtccctgctgtcggctgtcacagcttgatcgctagctcagagttcacgatgctaaccctgtagtgtttgtttcaaacaagattatgtgtgcatttaataaggagagctttaagcgtattgtaagagataccagaagagtagagcagtcgctctctagagccagagtggaacagtttgtagctgcttgtgtttctaatggaaaaggaattttggaagagttggagatttttataaaatatctgttgggtttcagtaaaagtaagccgtgacacagagggccctgcttaaccactgggctcatctggattctgctgcttccatcttccaggtcatgccagaggcagaagccaccaacgatggtgttgttttcctctgtttgaagagatattatcattcttcttttaaagtttgtttttgttttgttttgttttttgttttttttttgagacagggtttctctgtatagctctggctgtcctggaactcattctgtagaccaggctggccttgaactaagaaatccacctgcctctgcctcgcaagtgctgggattaaaggtgtgctccaccactgcctggctcattctaactttttaaaaatcgagaccttgaagtttttgaatatcattaaaaatgaccgtgctttctttaaaattatgcttataagataataaatatgtaaagaccagatgagtgatactagtaccttaactaattttttaaaagtttttttctaaatttttatattcaccaagtagatgcctagcggctgaggaaacccaaaaagggtatcagatccagtgtgcaactggagttacagacagttgtgaaccaccatgtcggtgctgagactcaccccaatcctctacaagagcagcccgtgcactgacccacgtctctaccttccttcactaaatttccataaacaggagttaatgtttaattcctaaatcagactgtggatacacttgttagagcttaaaggaaggaagtatggaatgtgttcctacagcatagccttaccagcctgagacagtttccccatgtaatacttaccattaggtactacagtgtgtattatattcctcctctcatagttaaaacaaggacaaatggtttttctttcacaaccctgcctcaaatcacctgctttacttttcttccaccttggttttggggtgcccactggaaaaagtcctgcaactttagaagagtatgcctgcatgatttgaagccaattcagaaagttctagtgtagcactgagtttatgtaggcattacatgacacgtaggagaccattcatatgcagcgctttccaaaaaggcttgcccctgtgtatttgaggtgggactttcatgtgatgattttgactgtactcaagctgaacacttctgaaaggacttcagtataaatgaggtttgcttatcagagagctaagggcttaccctcagtaaatcccctttgctaggcatggcgtctgtgaacccaaggaaagatagagtcacttccctaagacactcaccatctaggtttgacagaggaggtggacgggtgagcacacacacacactgtgtgtgtgtgtgtgtgtgtgtgtgtgtgtgtgtgtgtgaatgcccagggacattcacaatgctggttagctttgtcactctaagggcagctcttctaacgcaagcctgataaagggggaggggcaatgagggctggagcaagggagaggaggcagagctggggagctgtgagtggcaggaagacctttcccaacatgggaggggattgctcagtcattgatgggtgagcaccgccaagacagtagggagagcaagtagggagagcacgggaaagaaagaagaatctcacatcccgaggagacaccctcatccaagctaacgtgctaatgagtgctttattctgagcactctgggtgaagagctttatgcagacagtgacaatcacttggcactaaacgtttcattctgatttaaaataaaataattatcctttgctataaatgatacaaaaatcacatttgtttattatctcccctagtgagaacttttcccagtttcccaaacccttcttggtcgttggttgggatgatggagctatactgaggtcctttttgcttggagatcattgttgagaaggttgttttcttcatgacacatgaggattggaataaaactaacaagagttatcctaattgtgaaggcgatatctatggaacactttaagtacacttgggaagacttgctatgcaaagcatgaccttgatggggattccaggcaggagcaaacacatggagataagaaagtcacacctcctcctagactcaaaggttccaattctattagtaccttagtcattgcccttgggactctctgcagcttcactaatcagtgaccacttgagtatttgttctggtcatactttcttccgaaagcttggggaggagggttggatgagttgagacaatacctggccatcagaagttaagggccacagtgtctatagagccagtcttacaaaacataacttagcaagcttcgtgtagagaggatggccctggattcaagaagccatggtgggctgataattctgagaaagagcagggagcagtctggccaatgcagagcgtgtatacttcctgataagaatagaaggagaaaggccggtgttgtgaaaggcaacaccgtccacaccaccaaggtctcccatattgtctgccaaaaccaactcatgtttggagtaattcattgaaagtgactggatgctctgttgtgctgtctttcttatttatttatagatttatttatttatgtatgtgagtgcactgtagctgtacagatggttgtgagcctttatatggttgttgagaactgaatttttttttagatctggtcgcctcccctccttcagtcctgctcgttctggcccaaagattcatttattattataaataagtacactgtaactgacttcagatgcaccagaagagggcgtcagatcctattacaggtggttgtgagccaccatgtggttgctgggatttgaactcaggactttctgaagagcagtcggtgctcttccccgctgagccatctcaccagcccgagttgtgctgtcttacacggcaggcccctgatgcctcttgggttcttctgtctttcagtttgaagtttctcctagttagagaagacgaaaacaacattgaccttcgaggtcccaacagtccctgccaagattacttcctcaggcaaggactgacacccaaaggatgttgtctgaccgccacacttaacacacacttacaccttcacacaaacagacacactcacattacacactctctcgcgcgcgcacgcgcacacacacacagagcttcctccacaaatagtaaatttgctcttacttttcttctaagcatagatagattttgttttgttttactacattaagatttagtaaaagaaacttaaagaaacatggataggaactaatttgaaacagtcccaccgctgaaaaaaaaaaatacaacaaaacaaaatcatttcctagatagctaagcatttaacaagtctagtacaatgagaccccagagagttaggactgtgaactctgttatcagattcttgatgatcctgatttgtctgtggacactccagcccctttaggttttaaaagagcttactggttttaagaacctcactattttttgtttgtttttctttgtttgttttttgagacagggttcctcgatgtagccctggctgtcctggaactcgatctgtagagagtccggcttcacactcagagatccacctgcctctgcctcccaagtgctgagatcaaaagctgtgcccctcctacccagcaagcttcacggtttctcgtagatgaggtcattgtgcacgggagttgtcagggctgtgctcaaaggctctcgtctccccagataacctgctccttctattttactctcagttaaaagttctttcttcattgacatgttcagactagatgcaactgcgcagaggagccgggctcttcctataccaccctgaggattgaacctcaggccccctgggctgaccctgctagtagtgcagctggtttggacatgtggttcattaagcactggacagcaattgcaggcaggaatatgaagctaaagaaatgtgagaaaccacaccaagagagcagccattacttaacaccaaacataaagataaaatttggtgactacagcccgacatagtggctcactgctttaattaactctggcactgaggaggcagaggcaggaagatctttgagtctcaggccagccaggcctgtgtagggagaccctgtctcaacaaacaaacaaacaaacaaacaaaagatttggagaatactaaggagaaaaaatcaggagggatgtgaagccattgtgggcccttctgaaaaagtttgtgggagaggcaatttgcaaactgataaccccaggaacagtttgtgatggttgtgtactagacactccatgtgccagtgctctgtggtgttcccacgggtcacgtcccagccacagccgtgtccacagagcagcagcagcagcagcagcagcagcttcacatctaagaacagacgcgctaagaagcctctttctgctcgccctggtttgactgactcagtgtgtgaccactgaggtctaaggtcagaggctgacctggagaactcggaactgagctccggaggacaagccacctggcttccctgcaggaccatgttagagccaggggacgcctcacctgcccctcccattctgcctttcccattgtcttgttgtctgacatgttagaagacacactaacatggcccatgtgcttccttcctttcctcaaggaaggaaaagcaagcagctgcttgtccctttagccagccctctctcgtcccctgtgcctgtgacgctgtagcatgccattccctgcattctggtgcactgagcatgaattgtgtctagcgagactggatgtctttcgctaacaagtttttgtttatgcttttaatatgtcacatttctgcacacgactctgtttcttttattgtttgtttgtgtaacagaatccattttccaatttaaaaataacatttttaataagagagtcttctttttaccaattaggtcagagtcctaaaattttaagacccaaaccccatggtttagagcgaactgattcacaaaccataggtgactttgctacaagaagaaagggtatgtacctatgtggggcactgggattttatttatttttatggtttttttttttcttcagataaaaagaaggagagcttatgtagggctgctattgccagccgtccctgtgtgatagttataagagagcacatctggagatggaggtgcgcagcaggcctgcgtcctcactgcacggggattatctgatagtgtgtgccctcagtcaggcttggctccctccctccatcctccttacctttccaggcagtaactcattgtttcccttctgcttctgggctgctgtgagcccaggttgtctcctgtctttgtatatgtatatgttgttttctgttgtgaaatagaataagaaataatttcagtgtttttactatggcatggcttagaaaatgacagctaaactcttattcacctttttaagtttttgttttgtttgtttgtttgtttgtttttaaaaagggaacatgaagaaaagtcccctttcttcagcccaggatgctgtatgtgtctgttttaaggatacagatgggaaagctcttaactcaagatttctaactctatctttactctgcttgagctgtgagcctatgtgatctgcagctttgaaacgagaactttgtgcccctgtgctgttgataagatagttgattatgattacatatttttgaacccaaagtaagaaaacctaggaggttttgttttgttgttttttatgattcttttggtttggggtgtagcaacgattttagtgctttctacacatcattttacatatgaaaaactatactgaggcttcaatagtggggaccatgtctgacacagatgaagatgagattcataaaacaattcattaatgcgagcagtgcccagaggagctttaaaggggcatactttacgttgtcgtttaatttatatttacaggtagaggttagaccttgagctgagtcaagcagtatcgttgtgttgaagccatatatagtaggagcagtagtagaggttagacctttcgttgctgagcgttagactctgtgtaagacgatgtctgcctaccaagtgtgaattgcagcattgagggggccttgtttattttgtgaagttctgtccactcacaccgtccctccctttctttgcagtcaagccggcacctttagacataaaacctctgtcagaatgggaagagctgcaagccccagtcagatctcccatcaccaggagcttcgctcgggagtaagtgttctactgaaaacgcacagttggagtggcaagacaatgaaaattgtttatttcaagagagatgggttgaaaaagaatctagagaaagcccaaagtcaagagtatcttcatttgtcataataaaaatgcccgatatgtaactgtaaactaatgaccattgcagaaagagcatgttggagattgcttttatatgggtgggtatgtggggtgatttgacacctgttccgttaggttcatgatgtcactttctctagctcctctaggtttcccatgtcccctcggcctgattctgtgcacagtacgacatcgagcagcgactctcatgacagtgaagagaactatgtccccatgaatccaaatctgtctggcgaagacccggtatgtgcaggcctcgtgttcatttctctacctgagctgccctttgaagcgagttcagcttaaagtgttctatctgtacacatttaccctcccgtctttcttcctatccttgaaaaaacaatgaaataatttttaagtgatgctttcttacgtactgtcaaagtctcagaccagctgggatcaaactgttctgtttgtacagttggaaatcagtgaaaacatgaaggttttcattacagctttctgtagcttgtagcaagttcccgaggcaatcaacttataaagacagagaaggtgtccgtgacttggagtgttaggagtgtctgtgattgctcagtgttgtcactttgggccagtggtgacacatggttgtggctagtggcacagcaaagctattggccttatgacctatagtgaagtgagacaaggagcttgcttgatatgatatgttcaaagaaatatgaggtgataaattttcaaaattccacataagcaaactggccgacactggggccagagagcacgtgctgctcttactggagttcagcttccagtacactgcagatggttcactgcagcacctctacccagggcatcgggtaacgtctgctgtgtgccaggtacagctgaaaagtcaactgtcccctctgcagcttcccgtgccaccacgactctgaccctcccagccctgcattagattgtcaagcaagcttcatcagagctcttcactcttggaacacggtgtgttgatggaatgccatggaagttcacagggctaacatgctcttggacttattaaatcagtgtaaacaaaattaatagtcttagaaaagctaggacagactcattaccacatctgatttgtgtgtaaaggtcaagtcacacgtccaccaagtgaactctaactagatggcctaaattttagccatggtccagcacttctgccataactgtccctagggaataacagaagcatcactcagttttctatatgtaagaattttagaaaacctagcactattgtttgtttttttccttgatatacagaatatctagaacagtctctgaatcttaaaagtttctctaaaaactgtgtggaaaacactgggtgacaggctactgtagagtctaacagctgggtttcagccctactttaagatgaaaaagaagtccagttctgctgataattagacagagttcagtgagaaatgctgacagattctcttggggaacagctggctgcagttgactgtgccaggtcctagggatttatgccttgcttttatgactttataatattgtaaaaattgtcccagccagcgcaaggtagggcatgggtgtgtttgcagttgtcacctttagacacaaagtgttaccctcaccccaagctgagagtgaaagatggtgtccttcagaggacaaaaagattgttattgcacatttcagggttcctttctcataacctaggaaaggggcgaggggtgccagccattttaactgggcatccagatgttcctgaattcttgtgagctgcgccattggtctgaaagttcttgccaaagtctgtttctgtttctctacatcaagcttgtttgttcttacttgttagtgctgccctctatcttcctggttgtgctacatgattctagagagttttatcatatgcttcttagaggaagaatggcatcagactaagagaaaacagaaaagttactggaaggaccgcagtcatgatccacatcctttagttaatgtactccaaattcattcttctctaaatacctaaaagttaaatgtggatctttaattctttattaatttttttaagatttatttattattgtatgtaagtacactgtagctggtatcagatttcattatggatggttgtgagccaccatgtggttgctgggatttgaactcaggaccttcagaaaaacagtcagtgctcttaaccactgagccatctctccagaccctttattaaatttttaatgcaatatgttttggccgggcagtggtggcacacatgtttgaacccaaaacttgggaggcagaggcaggtggatttctgagttcgaggccagcctggtctacagagtgagttccaggacagccagggctacacagagaaaccctgtctcgaaaaaaccaaagaaatacatacatacatatatatatatatatatatatatatatatatatatatatatatatatgtcatattctttcccctcccctccctttgaaagcaagaaatatgaggatccttcactataataatgtaactgggtacatacatatatggttttcttttgttttgctttgttttgagatatgaagttgcagttgttaacctaggacagtcctttttcactgttcaaggtttatttggtgttttcattggcatgacatttaagtggttggttccatcacccatatgcagatcttacatttcacataatattgcagtgcacactacagacacatataatacataaaatatcctgtagaatatttatgcaaagttatacataatggacgtacacactggagccaggttatgactaactgggaactcgttggcctaggcatgcttggtgagggtgcacagggcagcaatgcagaaggctcgcagggtaatcaaagcctgcacagttggcagtgtgtctcggagacagtgggactgtcacactaaccaggttaccactacacaagtaccacttggcagcagggcagagctgtgggaactgagatgtttccccacaccacctcaacatcattgtactaaccacagctcagatgagaagggtgtggtctccatagaatccctgctgcagcctggacagtgaagtgcgaggacactgggaagactttagaactgcagctccttctcgattccccagagggtgtctgcactcttcttcaggcgggtctcttcctcaggagtcaatgtcaccttcacaacatctgagattccattttgtcccaagatacttgggacactgaggaaaacgtcatcattgattccatagagacctttaatcatggtggaaatgggatgcacccgcctaaggttcttcgttatgctcttggccaagtctgccacagagaggccaatggtccaggatgtgtaacctctcagcttgatcgtcgtatatgcactgtccaccacctgcttttgagcctccttccactgctccttaaaacagtctgtatcagtgcccagttctgggttcagagacttcagggagacgccagcaacgttcacaccactccacacagggacactggagttgccatgttctcccaggacccagctgtgacagctcagagggtgaacccccagcctttctcccatcaggtaacggaaccgaactgaacccagatggcaaccacttccaataactcgacttttgagacagccactgattttccgagccacttaggtcaaaatatccaaaggatttgagacaatcagcagcgtgcagtgtggactgtacttgacaatgttgggaaggatgaacttgaagatgttcacgtttcgctggaccagattaagtcagctctctccttcttgctgacggcccctgctgtgatgaccagcttggagtttgcagtcacacagttgtctttgctggagaccgtttttggtgttttaaggaagaggttgccacgctggagatccatcatctctccctttagcttgtcttccatgacatccgccaagtccttcattaagatacggatggcacaagccatgccaacagcaccaaccccaacaactctaatcttgttctgggggacctgttcttccttaagatccacagtcagctggtctttgagggttgccatcttggactttgaatcttttgagaccgctagagcacgatggggggtgatgggcaagcagcagcgtggcctgggctcagcgacagtggctccagcaccagcctaggacagtcttgaacttgtaattctccttcatcatcggcttccggatatcggaattacaagtgcgctttcacacccagacctgcatggttttaagaatgagagcttttgcagctgtctgtgacttgatgtctaagacttttttttattattactctttacataattctgagtgtgtgtgtgtgtgtgtgtgtgtgtgtgtgtgtgtgtgtgtgtgcatcttggttagggtttctattgctctgaagagacaccatgaccacggcaactcatataaaggaaaacattccattggggctggtttatagttcagaggttcaatccattatcaccttggtgggaagcatggcagcatccaggaaggcctggtgcctgagaaggagctgagcattctgcttctgagagggcaggcaacagaagtgaatgtctgagccggaggcagacttgagcttctgagacctgaaagagacctcaagtgacacacccattccaacaaggcctcacctcctaatggcgccactctcaatgtgccaatggggggaccattttctttcagagcctcgcagtttgtttctgcgaagggttacttacctgtgcaaacatgagtaaagttatttacttgagtaagggacagttaccagtggctacagcactcaggctgagtattagtttaactaaatttaacttcagagcccaggagttcaagaccatttttgaacaaggtagtgaccctccccatcccccagggggaacaagagagggtgggagaagagggcatctcctgagtgtctgcccactgttcgctgttctgttttcagaatctctttgccagcaacagccttgatgggggaagcagcccgatgaataaacccaaaggagacaaacaagtcgaatacctggatttagacctagattctgggaagtccacgccaccacggaaggtaagtgagcccgtgttctctagataggtcaagcacactttgagggaccatgttctttggggaaagttgggggcctgattatttaaatttagtgactgttgtttcctaagtcacaagcaacagaatcatgaagtctgatagatttgtttctccctttgtagaggtcggtcagttgtgcagtttctactcgtcatggtcagtgcttttgctgtctttagaatgaagaaaatgtggcttggatgagtggggtagccacatctttaatcccagcacagggaagacagaatttatctgtaaaaaggaagaaaaggagaacatggctcatggctcaagtcatatgctgttttgtcttaaattttaatttctattaaacctaccaattacacagtttctttataattctttggttttggtgggttttttaaatatttaacatatatgtgggtatatgcacatgggtgcagtgtccctcagagactggaagagggcattagctcccaggagctagagtgacaacgggttcagttcctccgaaagagcagtgtacagcctcccccacccccagccctccttccagcccgtgcatcactggacttactttgttatttaagtcctattttcttacattgtttttggcttatcattctctcttagactcagattttcaacagtgtcctgttgaagtccctgtaatctgaaggtcttttggtagtgaattcttctcaggttgtgtataactgaagtctctttattttagaaacaagttttgttgagatcacagttcttgttttttttcctgtgacataattacataattttcaataatttgaattctgaaaataaggttgaaaaaaattgaaagatttgcttacagaagatgccattatttgcacagagaaaagctcacggcagtcatgttaatgtgtgttggaaaaggccgctgtcatactgtcagggtaactgagctactgagtcagttcttaactgagcctctttactgcatgggggccctctgttgctgtccagtctcttgttctgtcaaatgtgccctttggacacttcctatctgtttttctggctgcttttcagatgtttcctgctgaatttacagttttatgacgtagatgtcttttcactaatctgcttggaagttgtgctattcacacacgtgtacgcatatacacatactcatacgcaccaacacatacacatacttacacatataaacatatatacacacatacacacagacacaccacacagatacatacacacacatacacacatacttatacacacatgcacacatatgcacacatatgcatacacatgtacgtgtacacgccaacacacatgccatggctgtacacatgacttttctgcttcttttgattacctttttgtcacctgccaggaacacatacagtatacctactatttctatatctttgtagttttctgttctatgatctatgtatctctgttctatgtatctgtttaattttggatagtttttagctctatcaccagatttcctaattctcctttctttttgttgaggtgttttggtttggttgttttgttttgtcttttgttgttgttgttattttgtatttatctctggggtgaaatgctgtttgatttactttaactgacattaatctctttgtgttacttgtatgtttaaggccttttctggcttatcttttaacactgttcacacacttcataagtccttggaggccggaatttgcatgtactgtttctgttagcccacactctttatggctgtctccttgtgtgtttatacatttttattacaaattcatggttgaacttggaggacctgaacttcctccacagagcatctctaattccccctggaggcccactgagattcctgctctgggctcacgtcagcttccttcaagcttgtcaggagccttgttatcagcatcccaccttccctgcctccttccccacccaccgagctgagtccctccccatcctccctgaagatcttagaatgtccttgctatctaggagccctacagagcattgcccacccagctggctcagctactgcatatctagctgcaccttaagaaaagagggcctggttgtggtggcacaggccagtacaatttgctgaaggaggcagaggcaggaggatcacaagttcaaggccagtctgggctacacattttgggctagaaagatggctcagtgtttaagagcacagactgctcttccagagatccagagttcaattcccagaaaccacatggtggctcacaaccatctttaatgggatccaatgccctcttctggtgtgtatgaagatgagctacagtgtattaatatacataaaataaataaatcttaaaaaaatagagaagaggaggcagctttcagttactgtgtatctagttgcacgttaagacaagaggggacatctttgtagtttactttcctgcaaatataactttgccttcagacacaccagaaaaggacatcatatcccattatagatggttgtgagccagtatggttgctgggaattgaacttaggacatcaggaagagtaaccagtgctcttaaactctgagctatctctccagcccccaaaagtacttttcttgcacaaagagtaaagagctgtttggtgctgatccgggcgagaggaaaaaacactcaaacataagctaaagagagtctagttctgtgtgttagatgagctagattttctatgaatgccatctgtgatagcagtattattagtttgaatagttctatataattttaaaattaagagaaatcggtgtcaagttagagagtggacagacaataccattaatctgaggaaatgccagtttgtgtgtgtaattccaagattacatatgtctatctatctacgtttgtttgtttgtttgtttgtttgctttgagacaagatttcattatgcaacccttgctgattcggaactctccatagagcaggctggccttgaactctaatatagagatccaccagcctacctatgcctcccaagtgctggcatgataccaccataccctgcatatgtatcaatatcaaatcttgggtttcactcagaaccaccctcacaaatggccccttgggggtatttccttgtgttttttagcaaaagagcagtggttctggcagcagcatggcagacgagagggtggattacgttgtggtggaccaacagaagactctggccctgaagagtaccagagaagcttggacggatgggaggcagtccacagagtccgagacacccaccaagaatgtgaagtgaagacatgccgtcgcctctgccggcagacgagatctgagtggaaagagagatgccaagtgaagatgttcccactctcagtggagcctcgagccagcaggggcagagagaaggatctctcacacatgttcaagcaaattaggttgtgaatggtgctgtgtggtattggatttataacgtgtaaataacccggggaaatagtgtttttagttcacagagaagcttctgtccctaattaacacacctgtagtattactatactgatgcacttttcatttaaaaccttggtttgggtcttcccgatctaccttaacagactttccttgggaggtcttttggcctcctcacactactctatataacaatactaagtgaactgagctacttgtaattctggaaattccagttgaagctacagggctaacaccattaaaacaagaagtaagttgacacattcgcttttctcttgaaggtggtagccattagcttaagctgtagaacatagttggacttgtccttcgttgttttccaaaaattccggggatattgtatatagcaggtcaagacctagctctctgactcatgtacacttaggttttaactgtaggactttgttattattattttttttgttaatgacagtgttgggttcatcgtgtgaaggttctgctgggtaggatcttgcacctttcaaagactgcctcttagttacactagtaagcccccaaatcatccacagcatggactgctggcctgctcttactcctgtttatgtgttaaacattatctgcaaaaggcagattatacgactgaccaatcaggtacgtacaaggcactgatgtgctaatacagtgattgggtcagacaaagtgcttcagttagtgtgcgttcgtcctaatcttggtttagaattaatgaaacagttggcgttcactgtcagcagcatagtgtgattttgaatgaattaggcaggaattcaagattactactcttagctcgctcgctctctctctctctccaccgtagtgctcttcctagggttttctttcttctacttaatatcttcttggccttatatttaaatccctatgcaattaatgttttatatctgcgtttttaaaaaagaaatgtcattttaagtgattcttgtatgtagcaagcacctattgcttttgtgagtaaatgaattaagacttttgtactgtgatttgtactcactgccccagttccccaactgttggagccttgctgctgtgaaacgctgtagtcaccatagttgtgtccaccacccagccgggtctgtgagtctcacctgtcacgtgacatcgtctggtgtggatgttggctctgaattagtgtcactgcagttacacgtgtctgtctaggctttgcaagatgctgtagtcaccatagtcgtgaccaccacctagccaggtctgtgagtctcacctgtcacgtgccatcatctggtgtcactgcagttacacgtgtctgtctaggctttgccgcaaccttgagaagcagctagcattttccgttgttcacacagtaaggacaatgtctctgcattgatctgaggctcactggtggcctggggaagggacacagagaacagaatgtctgcagctgaggcttgtctctcttcgttcagacctcttacctgttgcctgagtacacaatgcaccccgctttctggcccactggccacggtgctgtgcctaatctgagttctcccctggcttttccagtcagtttgaaagctgtgttcataactagatgaagtgtagaatagtaatattagatgcttttaaatgttcgcttctttttaaacaaaaactaaaacccagaactgaattttgaggtggatttttaaataaaaaaagattgagtttgctgtgtgagctgtgttacttttttcttacttttaatatactttctatttttttgagcaagcaacaagtgtcaagaaaacacatactggggttggagagatgattcagtgattaaaagcactggctgctcgtaagaaaagactggatttcagttcgagcttgacatagcctctcacaggcaatcataattctggttccgggagtctggctcctctcctggcctctggacactcactgcagacgcgtgcacagacatgcatgcaggtgaaacacccacacacatactaaaaatgttgttatgtatgtattctcttgggaacatgacacgtagagagccagagagagggcccagtgcttacagcacgtgttgcttctgctgagaccagggattcatggtagatctcagccatccatttctccaggtctagggacccagatgccttcttctgacttcctttggcactaggcatgcatggtgatgcaaaagaagttaggagacacagggcccatcctatttctgggtatctgaatataattatacatattactggtagcccagagacaatcacagccttgaatgttctgtaataaaactaccaaagaaagccaaaatccttgagatgtacctgaactctcaaatcatgtgaaacaggtgaaaaagttagagggtgttatgtgaaaagtgaatatagttttagatttcagatacaatggtatatgattaatccagaagcaaaaaaaaaaaaatgttctttaaagctgcctcttagggtgtctttataatttaatttataagacagagtttcattgctgcaaaaagacaccatgaccatagcaactcttataagggacagcatttagttggggctggcttacagttcaaaggttccgtcctttatcatggcaggaacatggcagcctgtaggcagacttggttctggaggaactgagagttctgcctcttgatcagaaggcagccagtaggaggccctcttctgccctaggtggagcataggacatcaaagccagccacccctgtgactcacttcctccaacaagactacacctcctaatagtgccacttcccatgagccaagcacattcaaaccaccacacctgctagagtgcttactgagtctgtgcaacccttggctttgctcaccagctctgcataaatgggcaacggggcatagtagcacaaatgttagcttggcacacaaggtggaggcaggagcatcaaacattcaaggccaacccacactgcattgaaaccctgtctcaaaaccctttttccttggggctgcagagatggctccgtaattaagagcactggttctttttccagaagactaggattcgagtcccagggcttacatatcgacccacagccatctgtaactccagtcctgggggatctaagagcctcttctgaccctctgaaggcacagcatggtggcacagacatgcaagcaaaacacccacacacataaaatcgtttaaatcttgctgtgaggcttcaaagcagttataaatattttgtatgctttctccataccctttcacagatgactgcgcttggagatcgaaggtgttctaatttgcaagaatgctattatgctgaattatctaaggcttgaagagctgaggatgtagcttagtgacagaccatgaatttagcaagctggatccattctgcagcttaaaaaacacgagagaaaacgttgtattaggaaggccaggccacttgctgtacacagataagacatattaaactctggattaataatttaactcatgagacagttacctgtagagcagacttttccaagccttctaagcaccagactctttaaaatatttatgtttctcaaatacttagagccagaaaaattcgtcttttttcactatggtgtcatctaaattatttctggagaacaagaatgtttaattgttgacaaaaactcaagaactagtttactttcaagcctaggggtttggtttttttttttatgccattaagaaatttttttgtttttacaaatgtaattgaaaatataagttaaaacatgcatatcttgagataggcagggtggcacttgtctgtagtctcagcactagaagctggaagcaggagactcagtagttcactgctctttaaaataacaaacacgcagccagggcatggtggcgcacgcctttaattcccagcactcaggaagcagaggcaggcagatctctgagttctaggccagcctggtctacaaagtgagttccaggacagccagagctatacagagaaaccctgtctcgaaaataaattaattaattaaaataaaataaaaaataacaaacacagatgggctggaggtcagctcagggcttaagcacttgatcttgcagaggccctgggttgggatcccagcacccacatggtgcctcacaaccatccataactctggttccagggacccgaagcctcatctcctcagacaccaggcatgcaggtggtctatgcacagacatgtaggcaaaacaaacacacacttgagtaaatcttttttaaaaatcttaccaaacaacaggaacaacaacaaaaatgtcccctacaaatttcctaagactctttagagtgcgttgcagagataagtgacaataagagaattatttttctcttatttaatgctatcttgcttttattccttattttacaaagttgtacgatcttacaaaggtttgaatgtcaaagcatcaaatgacgctgttcaatccatagaaggcatcagtcagtaaagctgcaaaaactatttttcatctgcattctatacatttctaccgtgagaatgttaatataattctataaaggtatcatgagtgtgtctctgatatatacacatatatattcataaatatgtgtgtatatagcatcgtattcagccaccaagtaatctgatacagaaactttctatgtagccctggctggcctggaactcactatgtaggccagattggcctcaaactcacagagagccacctgcctctgcctctgcctctctcatgctggaattaaaggtgtgcgccaccatgcccagctatccatagtgtttaaagcaagtgtttgctttcatttttgttttgagggacttcttgaagcggggtgtgttgtgccagggaaataaatgttagtgatccccaaaaacacacacagtagtcattctaatgtaactcacagcagggtctttattcaagctagctcgctgccacacacacagcccccaatgcaccactgtcatgctgggcagtttgagtggtgggggaaccccgaatgtctatcggggcagggctttatagtaagcagcaagcagggagtgagtgtgcaagcatctaattggaaagctcctgtgcctttaacataattggctgatgctgggagtcagatcataaacttaacttctgctcccctctgcattggtggtcgttaggcagggggtgggcttgtaatctggagtgcaggtttgttgggggaataatctggaaacactggtcttgggggtgtaacctggaaactctgctcttgttggggattagcctagagactagagctaggctcaggttctgttagggagcaacttgataaactaatgctagataccagcctgttagtctacctgagttcaaacttaggtcaagttctctaaaatggagtctgagtttaaatgctttggcatcctaggtacactgtcacccaggctagctgctaacacatcctgtgcttgctgcaacctcctcagggctagaatgtcaaatcaggcaccattgccctcaactagctttcattctctgctagtgggacattgtctcccttcccatttaattattttcgcgtattttgctgaagtatgctaggtggtggtgtttcacgcctttaatcccagaacccgggaggcagaggacggaggctctttgagtttgaggccagcctggtctatagagaacatcacaaccaggactacacagagaaaacctatctcagaaaattacatacatacatacatacatacatacatacatacatacatacatgaaaatatatagataaattgtagaaagactatgcatgtacactatgttatagtgatcattatcctgtttatctaatctattctgatcaaacacattaactggcttaatgaaacactgagcccatgttagaggaacattgagctactgtttctttctattctcttagagccactcttgttggtcttgtcttccattcactagtgtaataatcaggtccccaacagaagcagtacattggccaaatacagtgtatagcaatcaagagacatatactaaggtaacactgatggggttggttttttagcacgttttttaaaagatgtattaattattatatgtaagtacactgtagcagtcttcagatgcaccaaaagagagtgtcagatctcattatggatggttgtgagccaccatgtagttgctggaatttgaactcaggaccttcagaagagcagtcagtgctcttaaccactaagccatctctctagcccaacactggtgttttacataacttttttttttattactttaaaggctaaagacataactcagcggtagaattagttatctaatgtggtagtttgtatgagaaagacccccagagattcatgtttgattcttgatttctagggagtggaaatgtttgggaaggattaggaggtgtgaccttgttggaggaagttgtcttggtcatggtgtctcttcagagaaatagaatagtaactaagatatgtaatatattcatgatcctaagtccaacccccactactacaacaggcaccaactaacaaaacaaagctaaacatgaagtgatagacagtgatgaagatagatgttgtagacaccatgactggacatgatgaaaatccattgtcagctgactgccattgttgtttttggtctttctgcacttgctcatgtattactaaactgttcactgacagtgaactgtgtttccacttcttcaggccgtaacttctgtcttccaggaaccactgggttgaagtctccagtgagctaaaacagtattccaagaatacagatgattggcttgttaatgagcaggccacagcttcctactgagagtggaattgcattgttgatttttaattatgtctatatgtatttagtttatgtgtacatgtgtgcatatgcacagcactcatgtggtggtcagagggcaaccctcaggagttgtttctcttctaccaccttgtaggatctagagattaaactctgagtcctcaggcctccctgcccctctaaagtttccatgaccttccaaacaacaccactgcgggacaccaatattcaaatacataaacctgtggagacattgcacaatttactccacaacaaaactgtctctaaatgcagtcagatcctgagagtctaatgggtggtacatcaatgtgaagggaatcgggggtctccatggacaaatgcactttagagtgagaactgcccctctgccattgtagaggtcccattcccagcacacttggcccagtaatagaagagagttagagttaagtcacctcttgactgcttggtaaattaagggaaccagctggttaacaaccttccacaacaggaatacactcacaatggtaacataccattatcacttttttatctaaggggctagtcggaagagctgacattgaaatccggcaagggaaggagttggactaccaacaggccctttggtcttaggtaggaaagcataattatgtccactttgacctgaatggatctcagttttgaggcactctaaaccagtgtacctcaatggtgagtttctattggctaaaatctatctgactttgagtgagaggtctgagtggacgtagttatgctcccctccccaagaccaaagtgcctgttgatggcacttcttcccttgctgggtttcaatgtcagctcttctgactagccccttagtttaaaaggtgataatggtttcttaccacttaccaaatcaagtggccgtgctgatttgggggcactgtattaagcaatgtgctgtaaaaaatgctccccaaccatccttgattggttaataaaaggctggaccctatgactggacagagaggatagaaaggaggggcttgagatggagtgaggggtctcaggtaaagaccacaagaagtaggaggtcgccatgagactgagtgaaccatgaggaggatgtggccaaaagaagcacgcactgaggacacacatgcaggagagcaagactcagttggcaagccatgaggcatttatctggttactaatagcttggctgggttataatagtctcagaacttgcaagccgggtgtggtggcacacacctttaatcccagcactcgggaggcagaggcaggcagatttctgagttcgaggtcagcctggtctacagagtgagttccaggacagccaggactatacagagaaaccctgtctcgaaaaaccaaaaaaaaaaaaaaaaaaaaaaaaaaaagaacttgcacagtctaggtttgtagcttgttaataaagtctgatgtttctgtgttgtttactcggtagctaaatgggaaagagtggggcagaaaacctccaataaaaatattccaagcagggcggtggtggcgcacacctttaatcccagcacttgggagacagaggcaggtggatttatgtgtttgaggccagcctggtctacagagtgagttccaggacatccagggctatacagagaaaccctgtctcaaaaacaacaacaacaaaaaaatatttcaatagtcccctctcggacatttgaagaggcagagaagaggccaggcatagagaaaaaaaaaaaaaagcctcaacagtcaacatattcatcactataacaagcctatgattaacaaacatctatcaaccatcatgaagaaagttaggagctttggcagttccttgcttaactactaaccttgcctcttccttgaatgcttccctggagacttcagaaactgatagattaaaaaaaaaaaagccaagtgaataaatcaggtctgactacacaagtttgatccccaggacctaacatgccctcctcccacccaaagttgtcctctgaccacccaccacaggtatactgtggcatttatgcaataaacacacacacacaccccaaatatgaaaagattagacaaaccacatttctagctagctttccttgcaacaaggtcactcaccctctttccacaagtttgatttgtttccaacagtctattccagatagagcaatcactgccaaccaatgtaaggtggtgcacagctgcaaccaacagctgctttggtgacttcctgcatcttaatgagagaccaaccaatggtacaatggttcctcaacccagatacctaattgtccccatgcctggcatttaagttgtgactgttttgtcaactaaatggcttataaatatgccctgtagtggttttttcccttagattcttttaatggtatatattgatgatcttaatttttgagattgcacttcatcaaggtttcatttgggggtaatcattttggtcctcttattccaaaaccctgagtttttctatataagcattgttgctgggtttttgttgttgatggtggtgatggttgttgttgttgttgttgttgttgttattgttgttgttttgaaatgtggtcttactgtgtagcccttattggccagcaacttattacatagaccagactattcatgatctcagggagatctgcttgcctctgcctcccgagtgctgggattaaaagtgtccatttccacacctgttaacatcattatggtcttgcccttcacaagtatacctatagcccactgaacactgatacacattccttctttcattcctgtccaccagcatttattgacagaagccacactgcctaagaacccacacagctggggttctgttctgatgcttgctgagtgtgcttttcttaggaggacatttcattatcacagtgctgcactacaaattcgaaatctcgtaaagacttcttccacactgttttctcaatactgttttgccctatggtgcttatatgagtgtttatgatcaagagatcaactgaagctggtcaggatagtgcacaccttaatcccaacacccaggaggcagaggaaggtagatctctgtgagactgaggccaacctggtttacatagtgagttccaagacagccaggactatgtagaaagcttcgttcttagaaaataaaaaacaaaaaaaatgagaaagaaaagcagcagacaacaaaggacatgaagaaaatcatttatggaaattaatatggaagtgtctcaaaatctagaatacaaaactgctgtgtgagctgcagatacccaaaggactcaatcttgtacctcagagagacctgctcacctacactcattgcttctctagtcacaattagcaaaggaatggaagctactgagatgccctcaacagacaaatggataataaaaatgtggtatgtacacacaacagaatttttattcagctgtaagaaaaaatacattcacaggaaaatatatctggaaagtattgtataatagaagcccaaactcagtgcatatgtatgtatgtacttatgtatgtacatatatatgtatgcatattgcacttttgtatgcgtatatgtatgtgtgtatgtatatgtatgtacatatgtatgcacttacgaatgtgtatatgtgtgcatgtacctatgtatatgtgtatgtgtgtatgtatgtatatatgtgggtgtgagcctgagtatagggtatgaaactataaaggagaccagggaaggaggacagatattaagaaatggagggccggggcctagcaaacacagaagtggatgctcacagttagctattggatgtatcacagggctcccaatggaggagctagagaaagtacccaaggagctaaagagatctgcaaccctataagtggaacaacattatgaactaaccagtaccccggagctcttgactctagctgcatatgtatcaaaagatggcctaatgccgggcgtggtggcgcacgcctttaatcccagcactcaggaggcagaggcaggcggatttctgagtttgaggccagcctggtctacaaagtgagttctaggacagccagggctatacagagaaaccctgtctcgaaaaaccaaaaaaacaaaaaaaaacaaaaaaaacaaacaaaaaaaaaagatggcctagtcggccatcactggaaagagaggcccattggacttgcaaactttatatgccccagtacaggggaatgccagggccaaaaagtgggggtgggtgggtgggagggtatgggggacttttgggatagcattggaaatgtaaatgaggaaaatacctaattaaaaaaaatcttaagacaaaatagaattgatggaaaatggctttgtacttctcaaaatggttcaaaataaggccaacgttctctttatgtcactaacttaaattcagctaattctaatattgaaattagatgtgttttgtcattaagatatcttaaaggggatttgatttataatggcatctttaaaatttttatgacctgtattgtgcaacaacttcttaatataaatttgatagattattcccacaacttgacagaaatacgaaagacaaacatacaagtagctctaatctttgaaatgtaccaatagacaacatttacatacttgagaaaatagcatgttgagggaaaaaacacaaagaaaccatgtttttaatttgaggctcagcttgaaatgaaaggaatttatgcatatgagtttctagttaataatcagtcttagttacatgtgcttatgatccactgaaataatttaatggaattattgtaatttactgactattttctatattccagcaatcaattgcaatactttgaaactccttgtgtattttccaaagtctta

SEQ ID NO: 2133 - DNA, 3434 bp, Mus musculus
gctgcctaggcggcgggacggcgcgcctggcggccaggagggcgcactgaaagaaggtcggcgagccctggtccccgcggttcccgattgagttcctcttcagtccgcgaatctgcgggagaggttcgatcgccgacacagggcgcggggagccgggccgccccgtcgggggaatctgagacgtcctctgggctgcgtttgaccgccgtgcccgccgtgcacggagcgcgtccactgtgtccaccgacccctttggtgtctggtcctcgagtcctcacggcgtgcaccatgagcggcggcgaagtggtttgctcgggatggctccgcaagtcgcccccggagaagaagttgaagcgttatgcgtggaagagaaggtggtttgtgttgcgcagtggccgtttgactggagacccggatgtcctggagtattacaaaaacgatcatgccaagaagcctattcggattattgatttaaatttatgtcagcaagttgatgctgggttgacattcaacaaaaaggagtttgaaaacagctatatctttgatatcaacaccatcgaccggattttctacttggtggcagatagtgaggaagacatgaacaagtgggtccgttgtatctgtgacatctgtggattcaatcccacagaagaagatgctagttctcaagattgctatgatattccacggacctttccgagcgatagatctagttccctggaaggcttccatagccagtataaaatcaaaagcgtgttgacagcgggaggtgtctcgggtgaagagctggatgagaactacgttcccatgaaccccaactcgccacctcgacaacattccggcagctttaccgagccaatccaggagccaaactatgtgccaatgaccccagggacctttgacttttcttcctttggaatgcaagtccctcctcctgctcatatgggcttcaggtccagcccaaagacccctcccaggaggccagttcctgttgctgactgtgaaccacccccggtggataggaacctcaagccagacagaaaagtcaagccggcacctttagacataaaacctctgtcagaatgggaagagctgcaagccccagtcagatctcccatcaccaggagcttcgctcgggagtttcccatgtcccctcggcctgattctgtgcacagtacgacatcgagcagcgactctcatgacagtgaagagaactatgtccccatgaatccaaatctgtctggcgaagacccgaatctctttgccagcaacagccttgatgggggaagcagcccgatgaataaacccaaaggagacaaacaagtcgaatacctggatttagacctagattctgggaagtccacgccaccacggaagcaaaagagcagtggttctggcagcagcatggcagacgagagggtggattacgttgtggtggaccaacagaagactctggccctgaagagtaccagagaagcttggacggatgggaggcagtccacagagtccgagacacccaccaagaatgtgaagtgaagacatgccgtcgcctctgccggcagacgagatctgagtggaaagagagatgccaagtgaagatgttcccactctcagtggagcctcgagccagcaggggcagagagaaggatctctcacacatgttcaagcaaattaggttgtgaatggtgctgtgtggtattggatttataacgtgtaaataacccggggaaatagtgtttttagttcacagagaagcttctgtccctaattaacacacctgtagtattactatactgatgcacttttcatttaaaaccttggtttgggtcttcccgatctaccttaacagactttccttgggaggtcttttggcctcctcacactactctatataacaatactaagtgaactgagctacttgtaattctggaaattccagttgaagctacagggctaacaccattaaaacaagaagtaagttgacacattcgcttttctcttgaaggtggtagccattagcttaagctgtagaacatagttggacttgtccttcgttgttttccaaaaattccggggatattgtatatagcaggtcaagacctagctctctgactcatgtacacttaggttttaactgtaggactttgttattattattttttttgttaatgacagtgttgggttcatcgtgtgaaggttctgctgggtaggatcttgcacctttcaaagactgcctcttagttacactagtaagcccccaaatcatccacagcatggactgctggcctgctcttactcctgtttatgtgttaaacattatctgcaaaaggcagattatacgactgaccaatcaggtacgtacaaggcactgatgtgctaatacagtgattgggtcagacaaagtgcttcagttagtgtgcgttcgtcctaatcttggtttagaattaatgaaacagttggcgttcactgtcagcagcatagtgtgattttgaatgaattaggcaggaattcaagattactactcttagctcgctcgctctctctctctctccaccgtagtgctcttcctagggttttctttcttctacttaatatcttcttggccttatatttaaatccctatgcaattaatgttttatatctgcgtttttaaaaaagaaatgtcattttaagtgattcttgtatgtagcaagcacctattgcttttgtgagtaaatgaattaagacttttgtactgtgatttgtactcactgccccagttccccaactgttggagccttgctgctgtgaaacgctgtagtcaccatagttgtgtccaccacccagccgggtctgtgagtctcacctgtcacgtgacatcgtctggtgtggatgttggctctgaattagtgtcactgcagttacacgtgtctgtctaggctttgcaagatgctgtagtcaccatagtcgtgaccaccacctagccaggtctgtgagtctcacctgtcacgtgccatcatctggtgtcactgcagttacacgtgtctgtctaggctttgccgcaaccttgagaagcagctagcattttccgttgttcacacagtaaggacaatgtctctgcattgatctgaggctcactggtggcctggggaagggacacagagaacagaatgtctgcagctgaggcttgtctctcttcgttcagacctcttacctgttgcctgagtacacaatgcaccccgctttctggcccactggccacggtgctgtgcctaatctgagttctcccctggcttttccagtcagtttgaaagctgtgttcataactagatgaagtgtagaatagtaatattagatgcttttaaatgttcgcttctttttaaacaaaaactaaaacccagaactgaattttgaggtggatttttaaataaaaaaagattgagtttgctgtgtga

SEQ ID NO: 2134 - protein, 413 aa, Mus musculus
MSGGEVVCSGWLRKSPPEKKLKRYAWKRRWFVLRSGRLTGDPDVLEYYKNDHAKKPIRIIDLNLCQQVDAGLTFNKKEFENSYIFDINTIDRIFYLVADSEEDMNKWVRCICDICGFNPTEEDASSQDCYDIPRTFPSDRSSSLEGFHSQYKIKSVLTAGGVSGEELDENYVPMNPNSPPRQHSGSFTEPIQEPNYVPMTPGTFDFSSFGMQVPPPAHMGFRSSPKTPPRRPVPVADCEPPPVDRNLKPDRKVKPAPLDIKPLSEWEELQAPVRSPITRSFAREFPMSPRPDSVHSTTSSSDSHDSEENYVPMNPNLSGEDPNLFNSLDGGSSPMNKPKGDKQVEYLDLDLDSGKSTPPRKQKSSGSGSSMADERVDYVVVDQQKTLALKSTREAWTDGRQSTESETPTKNVK

SEQ ID NO: 2135 - DNA, 4291 bp, Mus musculus
cggcgggacggcgcgcctggcggccaggagggcgcactgaaagaaggtcggcgagccctggtccccgcggttcccgattgagttcctcttcagtccgcgaatctgcgggagaggttcgatcgccgacacagggcgcggggagccgggccgccccgtcgggggaatctgagacgtcctctgggctgcgtttgaccgccgtgcccgccgtgcacggagcgcgtccactgtgtccaccgacccctttggtgtctggtcctcgagtcctcacggcgtgcaccatgagcggcggcgaagtggtttgctcgggatggctccgcaagtcgcccccggagaagaagttgaagcgttatgcgtggaagagaaggtggtttgtgttgcgcagtggccgtttgactggagacccggatgtcctggagtattacaaaaacgatcatgccaagaagcctattcggattattgatttaaatttatgtcagcaagttgatgctgggttgacattcaacaaaaaggagtttgaaaacagctatatctttgatatcaacaccatcgaccggattttctacttggtggcagatagtgaggaagacatgaacaagtgggtccgttgtatctgtgacatctgtggattcaatcccacagaagaagatcctgtgaagccgctgactggctcctcacaagcacccgtcgattcacctttcgctataagtacagcaccagcctccagtcagatggaagcttcttcagtcgcgctacctcctccttaccaggtcatcagccttccgccacacccagacaccctcggcctccaggacgatccacaagactacctcttgctgatcaactgtcaaagcaagaagcctgaacctaacagaaccctctttgactctgccaagcccaccttttctgagacagactgcaatgacaacgtcccttcccaccagactcctgcttcctcccagagcaaacacggaatgaatggctttttccagcaacaaatgatgtatgactgcccaccgtcccggctgacatctgtctcgggagagtccagcctctataacctgcccaggagctattcccatgacgtgttgccaaaggaatccccatcaagcacggaggccgacggggagctgtacacctttaacaccccatctgggactgcaggtgtagaaacgcagatgagacatgtatccatcagttacgacattccgccaacacctggcaacacttaccagatcccacggacatttccagaaagcacactgggacagtcatcaaagctggacaccattcctgatatccccccacctcggccaccaaagccacatccaactcatgaccggtctcctgtggaaacgtgtggagtcccacgcacggcctcggacactgacagcagttactgtatccctcctccagcaggcatgacgccctcccggagtaataccatttccaccgtggatttgaacaagttgcggaaagatgctagttctcaagattgctatgatattccacggacctttccgagcgatagatctagttccctggaaggcttccatagccagtataaaatcaaaagcgtgttgacagcgggaggtgtctcgggtgaagagctggatgagaactacgttcccatgaaccccaactcgccacctcgacaacattccggcagctttaccgagccaatccaggagccaaactatgtgccaatgaccccagggacctttgacttttcttcctttggaatgcaagtccctcctcctgctcatatgggcttcaggtccagcccaaagacccctcccaggaggccagttcctgttgctgactgtgaaccacccccggtggataggaacctcaagccagacagaaaagtcaagccggcacctttagacataaaacctctgtcagaatgggaagagctgcaagccccagtcagatctcccatcaccaggagcttcgctcgggactcctctaggtttcccatgtcccctcggcctgattctgtgcacagtacgacatcgagcagcgactctcatgacagtgaagagaactatgtccccatgaatccaaatctgtctggcgaagacccgaatctctttgccagcaacagccttgatgggggaagcagcccgatgaataaacccaaaggagacaaacaagtcgaatacctggatttagacctagattctgggaagtccacgccaccacggaagcaaaagagcagtggttctggcagcagcatggcagacgagagggtggattacgttgtggtggaccaacagaagactctggccctgaagagtaccagagaagcttggacggatgggaggcagtccacagagtccgagacacccaccaagaatgtgaagtgaagacatgccgtcgcctctgccggcagacgagatctgagtggaaagagagatgccaagtgaagatgttcccactctcagtggagcctcgagccagcaggggcagagagaaggatctctcacacatgttcaagcaaattaggttgtgaatggtgctgtgtggtattggatttataacgtgtaaataacccggggaaatagtgtttttagttcacagagaagcttctgtccctaattaacacacctgtagtattactatactgatgcacttttcatttaaaaccttggtttgggtcttcccgatctaccttaacagactttccttgggaggtcttttggcctcctcacactactctatataacaatactaagtgaactgagctacttgtaattctggaaattccagttgaagctacagggctaacaccattaaaacaagaagtaagttgacacattcgcttttctcttgaaggtggtagccattagcttaagctgtagaacatagttggacttgtccttcgttgttttccaaaaattccggggatattgtatatagcaggtcaagacctagctctctgactcatgtacacttaggttttaactgtaggactttgttattattattttttttgttaatgacagtgttgggttcatcgtgtgaaggttctgctgggtaggatcttgcacctttcaaagactgcctcttagttacactagtaagcccccaaatcatccacagcatggactgctggcctgctcttactcctgtttatgtgttaaacattatctgcaaaaggcagattatacgactgaccaatcaggtacgtacaaggcactgatgtgctaatacagtgattgggtcagacaaagtgcttcagttagtgtgcgttcgtcctaatcttggtttagaattaatgaaacagttggcgttcactgtcagcagcatagtgtgattttgaatgaattaggcaggaattcaagattactactcttagctcgctcgctctctctctctctccaccgtagtgctcttcctagggttttctttcttctacttaatatcttcttggccttatatttaaatccctatgcaattaatgttttatatctgcgtttttaaaaaagaaatgtcattttaagtgattcttgtatgtagcaagcacctattgcttttgtgagtaaatgaattaagacttttgtactgtgatttgtactcactgccccagttccccaactgttggagccttgctgctgtgaaacgctgtagtcaccatagttgtgtccaccacccagccgggtctgtgagtctcacctgtcacgtgacatcgtctggtgtggatgttggctctgaattagtgtcactgcagttacacgtgtctgtctaggctttgcaagatgctgtagtcaccatagtcgtgaccaccacctagccaggtctgtgagtctcacctgtcacgtgccatcatctggtgtcactgcagttacacgtgtctgtctaggctttgccgcaaccttgagaagcagctagcattttccgttgttcacacagtaaggacaatgtctctgcattgatctgaggctcactggtggcctggggaagggacacagagaacagaatgtctgcagctgaggcttgtctctcttcgttcagacctcttacctgttgcctgagtacacaatgcaccccgctttctggcccactggccacggtgctgtgcctaatctgagttctcccctggcttttccagtcagtttgaaagctgtgttcataactagatgaagtgtagaatagtaatattagatgcttttaaatgttcgcttctttttaaacaaaaactaaaacccagaactgaattttgaggtggatttttaaataaaaaaagattgagtttgctgtgtgagctgtgttacttttttcttacttttaa

SEQ ID NO: 2136 - protein, 691 aa, Mus musculus
MSGGEVVCSGWLRKSPPEKKLKRYAWKRRWFVLRSGRLTGDPDVLEYYKNDHAKKPIRIIDLNLCQQVDAGLTFNKKEFENSYIFDINTIDRIFYLVADSEEDMNKWVRCICDICGFNPTEEDPVKPLTGSSQAPVDSPFAISTAPASSQMEASSVPPPYQVISLPPHPDTLGLQDDPQDYLLLINCQSKKPEPNRTLFDSAKPTFSETDCNDNVPSHQTPASSQSKHGMNGFFQQQMMYDCPPSRLTSVSGESSLYNLPRSYSHDVLPKESPSSTEADGELYTFNTPSGTAGVETQMRHVSISYDIPPTPGNTYQIPRTFPESTLGQSSKLDTIPDIPPPRPPKPHPTHDRSPVETCGVPRTASDTDSSYCIPPPAGMTPSRSNTISTVDLNKLRKDASSQDCYDIPRTFPSDRSSSLEGFHSQYKIKSVLTAGGVSGEELDENYVPMNPNSPPRQHSGSFTEPIQEPNYVPMTPGTFDFSSFGMQVPPPAHMGFRSSPKTPPRRPVPVADCEPPPVDRNLKPDRKVKPAPLDIKPLSEWEELQAPVRSPITRSFARDSSRFPMSPRPDSVHSTTSSSDSHDSEENYVPMNPNLSGEDPNLFNSLDGGSSPMNKPKGDKQVEYLDLDLDSGKSTPPRKQKSSGSGSSMADERVDYVVVDQQKTLALKSTREAWTDGRQSTESETPTKNVK

SEQ ID NO: 2137 - DNA, 158257 bp, Homo sapiens
  misc_feature (1)...(158257): n = A, C, G or T/U
aatttgagtcaggctgggcgcaatggctcacgcctgtaatcccagcactttgggaggctgaggctggtggatcacctgaggtcaggagtttgagaccagcctggccaacatggtgaaaccccatctctattaaaactacaaaaaaattagtgggatatggtgaacccaggaggttcaagtgattctgctgcctcagcctccatagtagttgggattacaggtgcctgccaccatgcctggctaatttttttgtagttttagtacaaaaaaatcctcgctgaggatcacacagtgttgaaatagttcctcttctccccagccagagcagaaaacaccataatgcacagagcattcatgagttccttgaaggattttgtctcagtagtggtggaaagttagccctagattaaatgacgctgtggtcctgcctaagaaaacgtaatagcaacaccccataaaatcaaactgttttcaagtaactatgttccagaacaaagctcaatatatttatagaaaaacaaaaatatccaacactcaacaagataaaatttacaatgtgtgatatccaatcagagattagcaagagttaggtaaatatggcccaaaatgagggggaaaaaaatcaatccattgaagccaatttagaaattacagacgatgacattagtggacaaaaacgttagaacagttattatagctatatcccatatgttcagaaagctagaggaatgacttagcatggtaagtagagacatggaagatattatgaagactcaaattaaatttcttttctttttttttttttgagatggagtctcgttcttgtcgcccaggctggagtgcagtgacatggtcttggctcactgcaacctccacctcccgagttcaagtgattctcatgcttcagcctcccaagtatctgggattataggcatgtgccatcatgcccggctaatttttgtatttttagtagcgacagggtttcaccacgttggccagggtgatctcaaactcctgacctcaagtgatctgtctgccttggcctcccaaagtgctgggattgaaggcatgagctaccatgtctggctcatcattttgagtttaaaagaaaattgagttaagtaaatctaagttttaatttaatggaatatttttgctcatgcaaaagagaaaaagaatagtttaaattcaagaagtgtgaaaaggtaataactatataaaatagctctaatactattttatatatagtgttttcatgtcacaattacaaagggattcgtttatgtttttaaataaaaactctcttttagcccactttgtaacctaaatttcgaaaattaagtttagagataaaattatgcagctcaggcagtgattccataatgtgtttacatttatcataatctaccctgtaatgattgtaattaaaatgtcgatgaaaagagtcaaattctgtaaaatgtttgaagagatttattctgagccaaatatgagtgaccatggcccgtgacacagccctcaggagtcctgagaatatgtgcccaaggtggtcagggtacagcttggttttacatattttagggaggcatgagacatcaatcaaatatgtttaagaaatacattggttttgttcagaaaggcaggacaactcaaagctgggggcagggcaggaagggatgcttccaggctataagtaaatttcagcatgttctggttgacaattggttgagtttacctgaagacctgggattaatggaaaggaatgctcaggttaagataaaggactgtgggggccaagttttattgtgcagaggaatctctcagatagcagacttcagagagagagatcggttgtaaagtgtttctttttttgtttttgagacagagtctcacactgttacctgggctggagtgcagtggtgcaatctcggctcactgcaacctccgcctcccaggttcaaccaattctcctgccttagcctcccaattaggtgggattacaggagcctgccaccaagcccagctaattatttttatttttatttttagtagagatgggttttcactatgttgaccaggctggtcttgaatgcctgaccttgtgatccacctgcctcggcctcccaaagtgctgggattacaggcatgagccaccgtgcacagccgtaaaatgtttcttatgggacctaaaagggtgcctggctcctatctcctagatccggaaagaaaggaaggaaaacaaaggggaaagggattctctatagaatgtggatttttcccgcaagagactttgcaaggcaattttgaggtatggcaaggaaatatatttttggggttaaatatttttttccttgtctcataatgttatcccagagtcagattgaaaagtaagtcaaaatatataggatcaaataaaacccatctgatgagaatatatggtttgtagggcatgactccctagactccttaggtaggaatttgggcaagataaaaaatcagagcttagtcctcaaaaatattctaaaaataagcaatattttattcctttgtcgaaggaccattttcacattataacaatataaatcttattgcaaggatatttcattttgagatttaaacattacttccttagaaatgattaaatgtgtaaacatttcaaattctaaaatgtaggtgggacctttgagaggtaattatttggtgagggcaaaagtaattgcagtttttgcactgttggaatttgccatttgatattgaaatacattcttaaataaatatggttatgttatacatcattttaatgggcatttctcgctttatttattttttgctacttattacttgctgtttattttatgtttattttagactatggaaatgatgttagacaaaaagcaaatttaagcgattttcttatttgagttcaaaatgggtcataaagcagtggagacaacttgcagcatcaacgaagcgtttggcccaggagctgctgacgaaggtacggtgcagcggggggttcaagaagttttgcaaaggagatgagagccttgaaggtggagagtgtagtggctggccatcggaagttgacagtgaccaactgagagcactcattgaagctgatcctcttacaactccataagaagttgcagaataactcaacattgagccttctgtggtcatttagcatttgaaacaaattgaaacggtgaaaaagctcaataagtgggtgtctcataagctgaccgaaaatgaaaaaatgtcatcacttcgaagtgtcatcctcttattctatgcaacaacgaagcatttctcaattggattgtgacatgcgatgaaaagtggattgtatatgacaaccattgacaacgagctctgtgattggactgagaagaagctccaaagcacttcccaaagccaaatttgcacccaaaaaatgccatggtcactgtttggtggtctgctgccagtccactacagctttctgaatcctggcaaaaccgttacatctgagaagtatgctcagcaaatcgatgagatgcaccgaaaactgcaatgactgcagccggcattggtcaacagaaaggacccaattcttctccataacaatggctgaccctacgtcaaacaaccaatgcttcaaaagttgaacaaattgggctacaaagttttgcctcatctatcgtatttacctgacctctcaccaactgactactggcaagcttcttcaagtatcttgacaactacttgcaggtaaaatgcatccacaccagcaggaggcagaaaatgctttccaagagttcgtcaaatcctggagcacgaatttttacgctacaggaataaacaaacttatttcttgttggcaaaaatgtgttgattgttatggttcctcttttgattaataaagatgtgttggagactagttatgatgatttaaaattcgcagtccaaaaccctaattacttttgcaccaacctaataggttacaagagctctgcccttataaatggaactggtgcccttatacaaaaggcctagggcagcctgtttgtgtctcttgccatgtgaggacacagcaagaaggcacgatctatgaggaacaggccctcaccaaacactggatctgctggtaccttgatggaggacttaccagcatccagaattataagcaataaatggctattgtttatctattacccagtctaaggtattttgttacagcagcttgaatggtctaggtcactgggtggcagagacatccataaagctaatgaagcttcagctcagggcctgtcattgcacaggcctcttgtgagagtggggagcttctaggagaagtggagtgtcctagtggagagggggtgtcaagctgtactcaggaagaatatgtaaggattctggtaaattacctataaatcttagaagaaagacatctgcatctccagggcttcgggaatttgttggtgatttatttcctcattctaaatacatattcatccaaatttcgtatttgtaattgcattattttcgttaaaaagactccccaaactatataaacttctggtcccaggacatgaagatttgcccctgcagaataattttgtatctatctgaggtcactgaacatgaatttacagtgatgtcactcatcctgttctgcgacttgctccaacagcacttggctggttgtgtgcagaagaaagtacagtcaagctgggcatggtggcttaggcccgtaatcccagcactttgggaggccaaggcaagtgaatcactcgaggccaggagtttgagaccagcctggccaacatggcaaaaccctgtctctgtcaaaaaaatacaaaaattagctgggcatggtggtgtgtagctgtagtcccagctactgggtgggctgaggtgggagaatcacttgaacccaggaggcagaggttgcagcgagctgagatagcaccaccacactccagcctaggtgacagagtgatatcccatctcaaaaaaggaaaaaaaaaaaaaaaagaaagaaaggacagtcaggtttgtccagagttggggttttgtgagataggaatgtttactgaaaatgtggaccacagaatttaagctggataaggagaagggagtgaagaaaggaaatgtctgatagatcacgggaaagcacaagtcttaatagactagaaaagctgttgagaagaaggaataattacatagggagatattgaaaaatcaagttgaaagatgtatagctaaagtgggatgctggaagggaataacaaaatgcacaaagatgattgcttgaggtgatttggatagatttttcttttttcttttcttttttttattttttttttgagacagtttcgtcttgttgcccaggttggagtgcaatggcgtgcgatatcgcctcaccgcaacctctgccttccgagttcgagtgattctccagcctcagcctctggagtagctgggattacagacatgcgctaccatgcccggctaattttgtatttttagtagagaccgggtttctgcatgttggtccggctggtctcgaactcctgacctcaggtgatctgccagcctcggcctcccaaagtgctgggattacaggtgtgagccacctcgcccggcctgatttggatagatttgaatgtcataggagatgaaatggtcatttgcttcaagaaaatgtctaaatctgaagatctccaaggacctgcacaatctgtcccttgcctgcctctgtacctcagccagtgccaatgtctccatcattcaccccactgctgccttcattcagttcattaaatgctccttccagcctgaaaacctgtacacctgcaccttctcttttgtctggaatactctcccttactatgtccaccaggccaacttcttcttatcctgaggatctcaatttaaagcctgaatttcctggcgggcgctgtggctctcacctgtaatcccagcactttgggaggccaaggcaggtggatcacctgaggtcagaagttcaagaccagcctgaccaatacagtgaaaccccgcctctactaaaaatacaaaaattagccgggcgtggtggtgcacgcctgtaatcctagctacttgggaggctgagacaggagaatagcttgaacccaggaggcggaagttgcagtgagccaagattgtgccactgcactccaggctgagagatagagtgagactgcgtctcaaaaaaaaaaaaaagtcttttcctcagggaagtccttcccaacctaccgccctactcctggggggtacatcctctgttatatgcccaaacaacactatattttcttccatagcatttatcaactgtattgccaaaatgatggggttaattatctgcaaaagcttttctctaggaaagaggagtgtgggaacaggtctggctttcccctactgtatcctgggtcctcagggactggcatataataggcatcccataaatattcgttgtatgaataaaatttaagatactaacatataataactttttccagcgtgccttttaaggcataaagatataaaatatgatttaacaaataatctaaacatgacatataaaaataaggcaaatttcctttctaaaatatatacatggagacatatctatcttcaatttctcttcaaccctgatttaatttctagaaatacaagcctaaaacaactcagtagaagataggaaaaacacttaaagattttttacataggaatgagataactgaatgccttatttgaaataaagaaaaaaatttgtggaaattcccaaagctaaataatacaagatatattacaattttccatttacaaagaactttataacaagagtgtaggaaatggtaaatttgctaaagccaatagttaactactcaacaatactagtcttactaatgctaattatacttttggctcaatgtagctacatgctgcctatgggagaagaggaaaacaaatttgatggtttattttcatttggaagatttgtggcatgatttatattcacatacttaaaaagaagtgctttggtttattagctgccataaaaattacgcttgtttatgtttcagaaagaacattaagaaatacagcaacaaacagcaaaaatcctacaatatctaatatgtgcctgatatttaaaactaccatttcttttttcctttttttcgagacagactctcactcagtcacccaggctggagtgcagtggccctatgtcagctctctgaaacctccctgtcccgggtccaagtgattcttgtgcctcagcctcctgagtagctgggactacaggcacgcgccaccacacccagctaatttttgtgtttttagaagagactgggttttcaccacgttggccaggatggtcgcgacctcctggcctcaggtgacctgctcatctagacctcccaaagtgctgggattacaagtgcaagccatcacgcccaaccaacactaccattttcctttttatttatttatttatttttcagagacagtctcgctctgtctcccaagttgaagtgcagtggcacgatctcggctcactgcaacctccacctcctgggttcaagcgattctcctgcctcagcctcccgagtagctgggactacaggcgcgtgccaccacacccggctaatttttgtgtttttagtagagactgggtttcaccacgttggccagggtggtctcaaactcctggcctcaagtgacctgctcacctagacctcccacagtgctgggaatacaagcgcgagccatcgcgcccgactaaccgaccaacactaccatttcttttcttttcttttcttttcttttcttttcttttcttttcttttctttttttttttttagagacacaatctcgctttgtcgcccaagctgaagtgcagtagcgcgatctcggctcgctgcaacctccgcctcccgggtcaagcgattctcctgcctcagcctcccgagtagctgggactacaggcgcacgccgccacggctaattttttgtattttagtagagacgggttttcactgagttgcccagtctggtctcaaactcctgagctcaggcaatccacccacctaggcctcccaaagtgctaggattacaggcgtgagccaccgcacctggccaacactaccatttctatttctcattaaacttctgcaaaatcggtgttgcaattcccatttcacatatcgggaaactgagactcagagacattgtgtaatttacccaaggtcacgactactcagttgatgacctgaaaagtgcatccagatctgcaagaagttccgcccttgtgatactgttaagtgcctgccaaaagatgacggtctctaaaccccagtgggaaccaggctttttcagatttttcttttttgagactgagtctcaatctgtagttttgttgaccctttatttgcttactaccctatgccactacctccatatatgcagggatctttgtcttgtcaccactccagcacctaatttcttattacaatcatctaacattttcaaactcagaggagcttcagaatatgaatgttgtgttaataagaaaatgactgaagttatgtctttccagaaatgctcatttatgtcgtcatatttttagcacttttatctgattatattatctgctgaaattggctttggggctttttcacaaataaattggagaagatgtttattacagaatcatgttaaactcaggaccagtataataattgtgaaacacacaaggaagtaggcaaatagaactagggtacccagtaaatttccttccttccttctttctctctctctctctttttttttttttttttttttttgacggagttttgctcttgttgcccaggctggagcgcagtgtcgcgatctcggctcaccgcaatctccgcctcccgggttcaagctattttcctgtctcagcctcccgagtagctgggattataggcgcgcgccactacgcccggctaatttttgtatttttagtagagattgggtttctccatgttggtcaggctggtcttgaactcccgacctcagttgatccgcccgcctcggcctcccaaagtgctgggattacaggcgtgagccaccgcgcccggccaagtgtccctcttctagtccagcatccgaacagtagatttcaaacaaatacaaagttaagtggaataggcaacaaatggaaggggtgtgagacttcaaaatgtctcagagataggacccaaccaaatccttggcctcgccaagcgcccccatcactctggcagaacagctccagagaccagccctggccagccctgggtccccatctgtcctcccctccaagctggtagctcccgcgccctcttggtctgtcctttaatctcgcgcggcggggaccggcaggatggtggtctccccgcggttttgcctttcaggctctcaagtaaagaaaaccctcgaaactcctgatctcgagcacagcacaagctccgagctggcaccgggctgagtcaagatggcaagccccggactgaacatttgaatgtccctcagtcttccccgcgcccaagccccagtgcctctgccctagccgaggcctctgcggtcttcccgggcgaggagccgattgggggccgccggacggcggaggaccctgctcctgcttcccgaactacagatcccagggtgcctctcggactcgcgctccctccctcccttgctccctcccttcgtccgtctcctcccccggcccttgttgttttggctggaagcactccggcggagtttcagagaaagtctgggcagaaaccggagccgggcctgaacgtgggaaggggaggaggagagggaggaagaaggagcccggcggccgggagagggagggagggatcgggatctggggccgagccgctcaggacctgccgcgagccccggggtgggggaggcggcgggggaggagcgcgaggggacgggacagcgggatccctcccaggagccaagccgccaagcgcctcgttcctctgctgctccccgccctcttcggcggccgcgagagcggacccaccctccggcttgacctgcgacctccctgcgcccgccgctcagaaacgccccgcgcttcgctgccaaccctgcggctccctctgtgacccgggaccagccccgcgcccgctgcccgtaggcggctcgcggcttcccctttcctcggcgttcaccgagcgccgcgaagtgacccaccctcccccgaggagagggaaggaggatcgctccgggcgcatcgaaaccgagggcgggtgggcgggcgagcgggcaccgcgcggggcattgtgtgtgtgtgtgtgtgtgtgtgtgtgtgtgtgtgagcagcgctgtgtctgtttcggaaagcgctctggggaggtcttgtccctagggggcggagcgcaaaggacagaagctccggcaccgagtcggggcagagtcccgctgagtccgagcgctgctgaggcagctggcgagacggcacgtctggaggcgaggcgggcgcactgaaaggaggccggcgcgcccgcggccccggctcgcgttctgttcaggttcgtgggcctgcagaggagagactcgaactcgtggaacccgcgcaccgtggagtctgtccgcccagtccgtccggggtgcgcgaccaggagagctaggttctcgccactgcgcgctcggcaggcgtcggctgtgtcgggagcgcgcccgccgcccctcagctgcccggcccggagcccgagacgcgcgcaccatgagcggtggtgaagtggtctgctccggatggctccgcaagtcccccccggagaaaaagttgaagcgttatgtaagtagagctgcgggcaccactccgcgggcctcggcgtccacacccctccccagtcggctcgccggcggctgcagctggccgcgcgcggggctggttcttaaacgaatgccggtctctttccccttggcccctacccctggcgggctcgggacagggtgccttgcactccctcacgcccaggcatccacttggccggacaactttcttcctccaggttccagacagcctgctttgcgggcctgttcgccccataaaaggacctagacgtccagctaaactcctgctgcatgctttttttcttccttaggaaggatggggtgcgatggagagaggagccttcttcctgctttattcctgcatctgattattgggctgatgtgtgctaaagctcccgcaccgggaaaactgccgaggttttagggctcactagccctttctttggtgggcgctccctctcctccgcccctcgagatgggttgcgggaagcgggctgtggagctgaggagttggtagtagagacaagcatatcgaacgcgcgcaaaagggaaagaaagaaaagttattacgcgccctgccgtttgcttagcagggttcacattttcgcggttttgaattgagggactttggagtttggcccgggagccttggcggtttgctgcgagaggagggcgctgggggggagcctagtggctggtgtttgggcgccttggatgtgctgtcaaactcggcaggaggggacagctgaagccagaagggatttcagttgcggtcctttcccagggaaccagagtggctttaatggtgtttgtgtaattgatacaagatgctatgtgttaaaccgttttagctgttaggaaaaatattccttgaaagtatcaaccttgctttagtggaaacctgtgtcctcttcagaggtctgggatcttattcttcctccccattggttgttttgttgctgctcccttgcaaaggaaagaaatgacacttttgtgctgacatctggatcaaatatttttctagtaaaatgtgtttgcaaaagcaaaatttatgcccccttaaatataatataaatttaatgcctgtacgaagggaacccgtttgtcgttgaggaatatctacacccagtattagagctcaggttaatcctgttagtcactgtttgcttgtatagaacagagtgaagtacacagagtgaagtatttaacttcactgacaactcaccagtgaatttctgatttactttctgccagaatttattatagacaagtaattttattgaaagactcgatgccacaaatcataagaaagctctccagagatgtgtaatgcctccaaatcctgtccatctatcagttttcctgaatatcctagtaaaaatgctaactttattccaaaaatatgaacgaggcagtgtttttttttccagctgttctaaagagaaaggtaggggtgtgtgtgtgtgtgtgtgtgtgtgtgtgtgtgtatgtgacagagaaggaagggagaaaggggtagggagataaatatatttgttttgagaaggcccaatttaggaaaaacagattcttggaggaattaaagaataacatatttgctgaacgtgaaagtgataatataggtttaattcattctttcacatggttagttcatggctcactcaaaagacgccaggcactgtattagacaccaaccataaggtcacaaaatacagtaggaaaaaggaaaaaagccctgcctcttgggcttagaattcaattgaactattaaccaggaaagaaatcagccaaaaagattatgtcttaacaagaaaaacaaaaaggaaagtataatttgatcattacaactgttttctgaggtaggtgtcatctctattttacagaaaacagtcctgcatttgaacccagatctgcctgattgattggactgtaaaaggttaacgactctcacctagttcatttcaaatgtggagcttagactaggttatctctaaaggtccttcaggctcacacctgtaatcccagcactttgggaggccgaggccagtggatcacctgaggtcaggagaccagcctggccaacatggcgaaactctgtctctactaaaaatacaaaaaatagccgggcgtggtggtgtacgcctgtaatcccagctgctggggaggctgaggcaggagaaatgcttgaacctgggaggtggaggttgcagtgagcagagtttgtgccattgcactgcagcctggatgacagggtgagactccgtctcaaaaatagcaacaacaaaataaaggtcctttcagattataacttttcctgactctgaatattagttgagaatacaagaatgaggtggactatggatcaggtgcacagtgctaaagaaatgtaagacctagtctttgcctttaagtagctctttgagtctttgggaccacgagacaagtatatgtgaaaaagccaacagtgcaaagtggtatatgactgtgtgtctaagttgagtggtatgggtattttttggctgttctgaggaacaagttcaatgtagactgaaactatgggaacatttgagagagacagtgggctgcctacattgtgttttccacaggaggatgaatgtgcctaatagcttgggagaaactaggattttctttgcctggtgtagcactggtgttttctttacccacgaataaagtagatggagatagtcctggaagacagtagacagggcggctgtcagaatagaggaaaccagcatggagtgtaatgagttaaataaggcttatttaactgtcaggttaaataaggcttgtattttacctgtcaggttggtggcccagaagattttgacattcccagattattgatcttttggctttgctgtccagtttagatggtttttgctaaagtagctttgaccatcaaagatatagacatgtatacgtgcatttcctatgcttgttttttttatgtagaatgtttatttttctggataaaggaaacattgttggccacccagtaggcaaaatgtttgtggataatgatttgtaatgaatggatttgctatgaaaagatatcttggatgcttgatactataattattaaatgagacttcagggagtttgagcatcatgattctgtttggaaatatttggcccatgggactttgacagttgtctcactgtttacagcatttatagggtagtccgaacactgattaagatgatccataagggcttttaagtgacaaaaaaattgttttagttttttttaattaatttttttttgagatggagtcttgctctgtcacccagactggagtgcagtggcactatctcggctcactgcaacctctgcctcccagatacaagcagttcttctgcctcagcctccccagtagctgggattataggcatccacctccacacccagctaatttttgtattttcagtagagatgggatttcgccaggctggtctcaaactcctgacctcaggtgatccacccacctcagcctcccaaagtcctgggattacaggcatgagccaccacgcctggccttaaattgttttagttttagctttaaagccatctcatatatggcccccaatgtattccatttacagctccgttttatgtttactgtttcatagtcaactcaagcaggattgttttttgtacacgctagtgtgttagtctgatgtgtaagcttttcttgaattttctaaagaatgacacacaaaaaaatgaaagtcaagagtagtcagcagattccccagcttttccttctctttttaattttttctatattcgcaaaaggttctttcttgtatgtgtttcattctcctggaagtttttaaaatctacttaaaatgtaggtgaaaattttaatgcttcttttcagggttgctactgtggtgttgctgttttcatgctgtgttatatattaaacagctgcttttttactttgttaaggacctgatggaatcataaacagattactgtcactaggattacagaaaacaagtaaagtcttggtagtatgcactcaacaatggtgctcagatttttaaagaattatttaaagaaatgatggtgaaattttcatcagaacctgaaattttagctgaaataagatgcaagtctgtaaataaagtattgtttcaagacagctggctaccaccatcgctctggaggaggagcttccttgcctgaagcccaaacactaagtttgggctcctccatagcccagctgtcagcattgggcaggtgcacaatctcagcaggagaacctgcttctgaggccagagcaaggtggcctgttagctgacagccagcctggtagcaaggccccagccagttcttaggtaggtaatctgtacccagcgtgggctctctgtctgctctgcagctgtcaattaacaggacaactcttgtctggacttcaaaaacacacccctggttctggaaatgggcctagaaacagaaatagcctctcctactgggtgggcacctgacatctgacatggaggagaggggcgtgggcaggccaagtgtcagcatctccttggttcaaggacaacccaggacctgtgctaagcatgaaacccctgctcaatagtgtcactacaacaaagaggactgtcatgtctagaagctcttcctatccttttttgacaattaccactagcaatcaatggattctgatgtttctgcttacagtgactgaataagcataattattctattgaaggaaattttttcttgccatcctcatgttagtaaacataattcagactcccaatgtttttaccttttcaagtgtagcaagaatgttttttctgttaacagagatcatcaacttgcaattacattaagcctttatgatggttaatgatagttcatttgttgtgcctgggctgaatgataagtgtagaactctccacgtgcaacttgctgaatctccaaatctgattgctaccttttgagattcagaattactgttaggaaggtgcattagtttggagggggtagtttgagaattctgctggctctttaaaattatttttttaagagatcatcttggaacaaaaagtggcaagagttatagttggataatctgtttgacaagtgactggttatttcagtgtattttgccataacctgcttaaaaatgtaaggagtaaaacacacagcgttttttgagagtaagtaaaatcccatattttagacttaacataaaaatatgtagataagctattgacaatttgcagactgagaaagtttcagaggtgatagattcttttttttttttttttttttttttttgagatggagtttcgctcttgtccaggctggagtacaatggcatgatcttggctcatggctcactgcaacctccatctcccggatttaactgattctcctgcctcaacctcccaagtagctgggattacaggctcctgccaccacgcccggcaaattttttttttgtatttttagtagagatggggttttgccatgttggccaggctggtctcgaactcctgacctcaggtgatccgcccgcctcagcctcccaaagtgctgggattacaggtgtgagccaccgtgcccagccagaggtgatagattcaaaacatgtgttaggtactcagcagtcctaattttcttacagagactgacagccagaaggagcattgtagtagatgggctactactttacttttgaagaattttgtattaaaatgtaatttgatgcacccactgatgcttttagtggggatgttttgctatagtggaaggaaactcagactgagtgtcaggacccggattctacttggttttgccattacccacccacaggagcatttgaccattctgatcctcagtttccttacctgtaaaatgggggagggaggagctgtagatcttcagcagaagccctgttgcagtttagcgttcctcttctcagacattttcttgggtggaagggacaaatggggagctcttcaataagctgcaacataaatttttgggggacataaatcttccttgtggggaaatctttactatttatcttaaatagtttagtgactgcttaagcagtattctttggggactcttggtttttaactgaaggcagacctgcatgcagggcctttggctgctgtgctcctgggctgggtgctgtgtcttgagcccctgtgcaatgcctggctcagagtaggagctcaacagatgcctgttgactgaataataaacaggtatcgcaggagcttttgttatgtgccatgtgtggaatgcaaggaaggaaaggcccactctctgcccttaaggagtttctaatctgtttgtgaagacaagctgtcagtcattttataggagctatgatatatgattagttgccaaatgaaagtttagagtgagaacaggggatgcaggggtacgagatgccagggaagactccgcaaatgaattttacactttgcttttagaagagctggtgtactgctggcagcaacagcaaaatcttaagggagggctggttttaaaggaagaacaaagatttgtgttgagtttagatgtcctcatgaaaaaaactgcttcccagcaccccagtttcatgtgaggagtttggctgtcagctgtatcttctagtttgagaagtttttgtttctgctaagatctaatgttcctcatgggttcctgagcacaagtgaattttctgcatcaaactagaaatgaacaaaacaacttgtttggtcacctgaacttattaaaattccaagggacatgagttgtttaagatttctttatgtctgttttaagctaagtaattcattctggcaagcagttagtttacaacagagagggagcatgttctggtgggagggagaataaaagagcctttgattcatttgcttctgagttccagcagcaggaccagggctgccttgggctagcgtcttatttcggactttggaagccatcttagcccagctgtgtgagtgccagctcgtgttgggggggagagaataacaccaacggatcacatgaaaccccctctccctgtggatggaggggtttctctcatttcacattcctcgcatcaacatggcgcctaatttccaccaagttagagctccatctgaatttgccatttgaacttggattgaagtcacgatctttctgtgactccttttatctcagtctgccaactaatacagaaaacttatcaagtcacagttctctttattctcccctcttggggtataacacacataaaattagcattctttcttttttatattacccctggcaaaaagtggcccattgtactgtggatttccatatttattaaataactaggctcttccgttgccagtgggatggctataggagcctcaataaattgtagatgacaatttaggcctgtagaattgctgagaaaagtcatttttaggaactggaattttttgctcattctaggcttctatgtttgagcatcttaaataatagaagaatgccctaactggaaaaaagaatcatttctcttttaagcaattcacttattcataggagcgaagttctccctagtttaaaaggtcgcattactgaataaagtacactataacctaagagcttttgaccttctcccagcccgtttttaaaaagaattaagactatgcactgtaatgcatgtttggttgttatctctgttacattagctcttgaagcattctgattacaacttgtagctgccaagccctgtcctgcagtattatctggaacaaaaattttccatgtggttgtttttagcagagctactatatgcaaactgcacgtgaaggatataagttataaaggaatagagcttctagaaggagaaatgtgagttaacttttttctaccatttaatcattctttcctcacctcttagtgtgtgtttcaataatgtttatcatctttctaaactgagttttcttttatttttatatattagaaagaatgccaaatttaccaagtgcttttctgatggtggttttcttttctcccagctttttactttgaattcatacttggcctaggtagttctcttaagttatgtgttcaaaaaacaatgtcctaagaggaaaaaacaaatggccacattgtctcatgaattaaaaacaacataccaagagtccaaacatttcaatgtaaaaatattaagcctttctttttttaggaagacaaatattaaactttgctttaactatcctgttgtttttcctttcccttttttatttattttcttttggtttgactcatgtagtttaaatttattttgaaaacagctttatacatacttctttaagaatactgcacgtaggggaaagcatcaaacttccattttacatttcaagagaaaagtgagaggaggccatcctcctgtcagaagaggggcaaaatgtcaaataataccaaggtcttctaacttacttttacattgcttggttatttatcattattgcctagagatatttagctatttaaacatgaaataagcaggtaaatgtaatttaagttaagcaagtttcacatttgcttttgtgaaacgaaatcctggacataagcattggaagaactcaactcattttgttgtagtttttgttttaaatagaaaatagagacagggtctctacattccccaggctggtcttgaactcctggccccaagtgatctcttgcctcgttgtagtttttattgttgtatttaactcattagccagccagttgttgtaacattttatttgctaactttttaaatgagaggaaggtaaaagcactctgtgccatagttccctactctctcttttcctattcatttctgcttctctgtgatataagcctagacatcaaaaatcacaaaatatttgtgtcccaatctttacacacacattctttcacgaaacttttctctaaaaagagagtgttaatttgtgtcactcttacttagtaatcaagaatagaaataataatgttccaactagcatgtagatgtttttctctcctgaaatgcagcttttagttactgctgtattgggaaatgtggttaggccactttctgactggcagaactcctccctgagatgactacctgatgaaagaattacctgcctgtgtgccttcccagttccagtccttagcacattcccatcactgctgtggccagagttggagttgccaagactaaggtgctggtggagggatgactccttgattatcgagagagaagtgctttaatctttgacttttgtaagagagatactaggtaaaagctaccttcagcgttttgaattccagtgctgttgtgtagagcttgatgaggaacgattacctcattcagctagggaggtattttttgaaccctctaccctctggcaaagttataattgaccccaaagttatgtaggattatttactttacatgttcttgacagtttcaggtttaaatgtttgaagtgttgagaaaaggtaaaaggaaatattgaactcctaataatgtaaaatatttgggaaggtactttgttcctagtgatgctgttacataaaaccaaagccttctgagtaatctttgctgggtatgtaggtcatttacctccaaagaaaaaggcacacaattaaactggtgctgttgaacggtattatttttctttctattcctttaagcagtcaaatagttgagagtcaaatttataaatgttgactgtttcaaatgggaaaagcaagcgtaatatatttttctagttgattttcatagtgacccacagtatacagagaaaaaggtatatacacaggaatctgtgaaaattatggcttcatttatcattcttcggtgtttgtaataggatattaatttccagaggacagagatggcatttgttctcttgtctcaaatatacagtatggtgccttgcatatactcttgaacagcacaatcaaataattgtagaattttgagcctaaaattgtaaattctcttgtccaatgtttcttaaccttttctaacccactcctctctcatgtattgtttgagtgtcctttggcttttaatccagttttactttctatgatttgcattacaaaaacaatagctatattgaaacttttttctaattacacatatctccttctccaccagtcaagaatccaacccactccttttacagggaatgaaaataagcctaagggaggtgaattgattagtccaaagtcatattacttaaccagttgttctgttggggtccatctctcccctcccagataaaatcctttccgtcagagtgaatgcccacatgaacagggcactgtgaagaatgcaaaagaagaggaccaagtgaacactgttttcacctttgagagctgtgtgctgctaggggacataggttgcacttagttctacaaattacatcatgatcagtgatgtgtgagacattctggtagaagaatccagcagagaggttaattcaggtactctgtgaaggcttaatgaaggtggcaagaggcatttcaccagcaccttaaaagatggattcagttttcaaagatgaggctggagtaagatctgatttctgtttctccttttcccagccagactcttgcattgttgtttacatttggctcttcctctttttcacctgctgttcatttcataatggaatacagctgggtcctttttccatcacccttatttaaacaccagtctctgatgttcctaagtgttggagttcttgagggttccagtgctagccctggttggtctcctcctcttttcatctttgttagttggttcttcatctgttgtgaaatcgtgaactcctttgaaaatttgaggctcccagttcccataagaactcttactaacttatacacaaacattattataatcttggatgttttctgacctttaaagctcatctatggctcttaacacctagttaaatgccctgaattatatgttgataatttgagtactctttctcagcccatttctcattccagatctatggctctaatggtttaaatccaaaactgcttatatagcccacagcaactcagagtcagaatgcccacagcagatcttatcatcctttcccttaaacctggtcctcttggctgttccttgtacagtggctcagccagaaggttttctttgacttttctctctctctcattctccacacccagtgaccaaaccctgtcggttttaccttccaagtatcttgatttattggccactcttgcctaggcgatatttgcctttcttctggattgctgcaatagccagttgcagttgctgctctctgcctcctcttgggcccctcttagctgtcttatcaaggcagccagagtgacttttctgaaataccaatctgataatgccattccatagctcgaagctgttctgccgcgctcttttgctcttcggagtgcctctgcctcttcccttggcttgcatggccctttatgtggcagcagcacatccatccagtagtgtttgttgcttccttctccactcagtctctccccttcagctatactgaactttcatggtccagatcagctctgagatctctctctccgggcctttgcacatgctctcctctcctccaggagtccttgacactctcttttctgtctcacaaccaggctaactttgggaaccttctctgaactccaccaccactgccacatgtacacacagacatactgtgctgggagcatctgttttgtcctcctgtcatgctctgttattctcatagcatagcacttgccacacttgatatttgcttgtttacttgcttatttcccctcccatggtggggccatgttgtgacttttgtgagccccaggtacatttgccttcataggtcccccccttcctagattaaaatattctaacctggagtagttatatattatttttcattttttattttgatttttttttcacgcttaattcactttatttttcttgtataaaaaccctacgttgtagccacagctggagcctgagtccgctgcatggagactctggtgtgggtcttgactaggtggtcagtgaagtcctgatagggagacttggtaaatacagtctctttccagaggtcaggggtcagatagctgtaggtcttagaaatggcatcaaaggtggccttggcgaagttgcccagggtggcagtgcagccctgggctggggtgtagcagtcatcgataccagccatcatgagcagcttcttaggcacaggtgcggagacgatgccagtgcccctgggtgcagggatgaggtgcaccagcacagagccgcagcggcctgtcaccttgcaagggacggtgtggggcttgccgatcttgttcccccagtagcctctgtgcacggggacaatggagagcttggccaggatgatggccccacagatggcggtggccacctccttggagcacttaacacccagaccgacgtggccattgtagtccccgatagcaacgaatgccttgaacctcgtgcgctggccggcacgggtctgcttctgcactggcataatcttcaaaacctcatccttgagagaggcccccaggaaaaagtcaatgatctctgattccttaatgggcagagagaagagatagatctcctccagggacttgatcttcatgtccttgaccaagcggcccaacttggtgacgggcatccactccttatcctcggccttgcctccgcgaccccggccccggatgccactgccgaaacctccgcggaagccaccgcggttccccatcccagggccaccagggcctccgggccctcccgctgcaccggcgtcatccgccatttggtgttttctcggaaaagaagctgatttttaaaagaaaatattaagacactttttgtgtgctcctaaatgtatcatgggccccaagcactgtgccttctgtctgatggatacgttggccctgttaaatgaacagaaatacttttaagataaagttgacagcatatgtcaactgcctgattgggactaagaacggtgaggagttactcagttattttgtcatgtggcactgttatcatggcttagctcactaaaacactcttaaggctttgtgttttaggctgggcgcagtggctcacccctgtaatcccagcactttgggaggcggggcgggcacatcacctgagttcgggagacagagaccagcctggccaacatggtaaaaccccgtctatactaataatacaaaaattagttgggcgtggtggtgcatgcctgtaattctagctactcaggaggctgaggcaggagaatcgcttgaacccgggaggcggaggttgcggtgagccgagatctcgtcattgcactccagcctgggcaacaagcgtgaaactccgtctcaaaaaaaaaaaaaaaaaaagaaagactttgtattttaggccctggtaatgggaaaaaaattatgtatagatttatataaaatatatttaaaaatatgtatttaggagcaaaaattgattatgtaaaaaaatgtgttctatgagctgtttgactactacgcacatttcttcatgatgtttctgtgtacagcagtttttagtagaggtgggtaggtgatttgtcccctccacgggacattttgaaacaggaaaggttcccttgtccccctcgcagggcatgcaatggggatgtgctcacttcttcagggccccactgctcaaacctctaggggagcatacagaccggcaggccgaggggctctgaccccaccgcagtgtctaggggtgaaagtttacagctgaggccccagcgggcgtgtgttacggggtgctcttttagtttgccgtctataggcagcttgtgttaaccagttcagttagaccccctcccttatcacaaggacagagtgatttctgtatcccagtgtttcttgccttggtgtaccagaagaattggatcacacgtggggctggagaatgagtgcaaggttttattgagtagaagtagctctcagcagatgggggagccagaaggcagatggttttcccctggagtccggccactcagccgcctgactcttctccagcttctccggccataccccgagttgttcggccagtcgatggtcagcttgcctgcgggtgctcttccgcggtgtcttctcccgccaacgagttcgtcaggatgtccagccgcttgtgtctgccacctagggtctggggggtttttataggcacaggatgggggcgtggccggccagggtggtcttggaaaggtgacctttcggcggcaaggctggagtgcctatcctcacctaggttcgtggggatggatccctagtcagggaccacgccttcctctaccaggcacttcccttccccacttccatatcatttaaagggaccaggctcttcccgtcccagcacttccataacaatttgacaatttctggagacattttggttgctacagctggagggaggaatgcttctggtatctagtgggtagaagcagggatgctactaaacactctattgcacagatttatctggctcagaatatcagtgtgctgaagttgagaaatcctcatatagaggggttcataaagcttggttcttacatttattttattcatttagtatatttccctatgttgccagttggattgtgtcatagcaccggaagcaaacatttatttttctgactgaagtaatgtttgagaaaaacagtcattgagatggctgagcctttgatcactagagggtttaggtgataggcaaattctctctccaaggatctgttgtcatttaaatcattaccaaaatactcatttttactttgctctcctagcttagagtacagccaattgttgtctggtagggggatgctgagtcatttattcatgcattttattacctcttggctgcaatatcaccattcattgttcacaagccacccagcttgtttactttttataaattacatgtaatcaagtcctcttgcaggtctggctactgtaattggcagcagccacagagcagggctgacaagtctgcatttatgctgatgtctcatattcagcccactctccaagctttctttcctcttccatgtgtattttagaaggaaggcaaatagaaggaatgcaaagagagaactgttaaggagttttctcttttcagatgatcttaagatacttatagcttggcagagtccttgtgtcatttggttgggaaaaaacaagggtctagagcagtcagtggtccttaaacttcagtgtgcataacaatcactgggtaacttctaaagtgaagattcttgggccctaccctccttctaatgtttttattaagtctgggtagaggtccagaaaactgcagtttctaacttgaacccctgctgattctgaagtagatggtccttaggttattcttggagaaatcctgagttgggcatagagggaaaaagagacaagaaataaaattcaatagaagtaaatacttataaagaaagcaagaaccaaaactgagagagtaactttaacctctcttctgtgagatgaagggagtgagtatgctgtgctgcttaaaaagataagcgtttagttttttctggcagtgaatgagatcaaactgtcctccaaagacgacatattgagaggattacagaagtgaaaaggaatttttagaaaggttagaatatgagaaagtacctaactgtcgccgagaaactcaaaagacatgattaaatcaaagaaagtgttttgtaggtatctgtttaaaaaagaatgtgcattcctgaatcaagagtttatgaatagcttaaagatgaagaggagagatgaaggaggattagctgttcaccagaagttctggttattctggttattggatctgaaagcatattattaaagtatcgtctagatttcctggaatagttctcatttctaatattctttcccattgtttttataatacatgtctgatttgccctaatttttggttagttgaggtgtggttgatttgtaaaagaacaccaaaagtgggtctacttgactgaagaagctctcttgctttccaactttgtgtttgtgtatgtgtgtgttaaatgtatgttttctaatctatctcttttaacctaaactttgattttaaagtccacattagagaaagagcaatagagacagactgactccactttagaaaattggtcaagaagtggaccaggtgggaatggttacttaatcctagcagaggaataaagtacttgatttccagctacctactgaatgcactctgctactagacagctattcttatttttttttttttgacatattatttccataggggaactttatagttcaattcagtaaccttggagagagatcctgaccaaaaaaaaaaaagagagagagaattttggaagttacttataaaatgatgagtatcaccagcatttgttaaatcattctttctttattctaattatctctgtattaaagtattgacttttccacatacatgctctagaaacccaggttgtactttagaacttttcaccactatagtatattaactagcttgctaatcctttttactgtctttcatgttctctccctgccatctgctcacaagattttatagaatcttcatatctgctttgtaagtgttgaggatcattattgttattgtacgaagtgtctaccacaccctctcattgcactgagagtccgagtaagtttagttagtagatcactttgctctgaagtgaatagaagggttgttgctgtatgctggtggagacccaaaaccagcttcttccatttactcaatcaaggaaggctagactcctgtgacttgtaccctgcactttgaagactgggctcaggacttgctctcttcatttcaggtgaccttattttcttgctttcttttgtttttaaaatcgtacacttggtatatatcttggtgtatctcctttttatgagcctctgagtattcctaactttttttcagatttttttttcttccttgttatttattctaactcatatactgtttaacatagtgatgggtgtttccaatgaatatttatattttctgaaaacaagtgtaaatgctcttagagagaagcataacattaaatagctatccaaatgcaacattgagaaatcacttataaattttcagtgggggtattttaacttacagttttccattttgagtttaaagtatagagaaaaaaagggttacaaaatattaggtaagcagatttattgccctttgcctaagttactaaagggaagtgtttcttttaaaaaaaacttagtgtagaagatttatcattaaactataatatacatatttgaccttgtaatatttttgtttacttatatttgaatagaaaatgtgcatagattcacttaaaatgtgtagtacattgttattcattatttctttgttttaagttataatttttaatactcagagatttccaaatctttaatatctacctgcttatgccagtgattcttaaataactaaaaaatactcttttatagtagcttttatgcacaatacattttttagcaaatgtgctttgccccaagttggagaattagttatatgttgagaagcccatgcttttactaagtgaaattgaaacatagatactgaaatatttttcatccttcaactaagttctagcattgaaaacatctgtttgttttcaaacaggatctgttgtttttctaaaccatgtacttccaaagcagaacagattttcttcgagatttttattgaaatacctcaaggagaagaaaatgactcaaagaggataaaggctaatttttcttaatgaaagaagaaaaacattttttactctttctattcttaatttaggcctaggaaataccctgagtccaaggccagctggtttcagcatgcagagataagactagaacacagcttcctgatgcccagaccagagctgttctcattaccatttctatatccacctccatctttagtgggttgctgtgatttccagcattcaaacccttgcacatttccagagccttttagctgtctcgtggagcagttcatcccaattgctgcctttttaatttttattttcaattgtgtttaaaacaaaacaacaacaacaacaacaacacataacataaacttgaccatcttaatcatttttaagtgtacggcacagtaggttaagtattcagattgttgtgccagcccaatctctcctgcttcaccgttcaatctcagtaacattggaaacaacagaagggtctttatgcaaatacctttcaggaaggcgtgcgcctcacctgtgtttgctccttcacagtagtaggaagttaattatgtgggatttgctcacctgatccacacagctgatcctactgtagtgcacatttggaaatcccacacccctttcttcccctgaggaaaaaattctttcctcatcctagattcagtgctctgtttaatcttgagcatatgagaatgagtcaccatgggtaagagtgtaatctcatttatacctttcttccaaccctcctttaattttttaagtttatgatactggatcctgctttcctacataagggctggtgatttggagactaattttgggagtgcgaggtgttgagattttttttgggaaccagtgctttctgttctgctgaacatgaagctgcatggcctaagttctgaaattcaggctatgtatggaatgtctgtgtggatgaagaaacaagccaatgcctttttttgggtcggggccggggggagactgggagaaagatgaatgaaaatgttaagatagtctgattttgtgggggaaatattcaaattttgagaatttgtgcaaatcaaagacaagcagttagttgctttgtgattttattttacccacaaaagaaatacttgatattgtgctgaagatgttgttgaataggtatattaactcagataaaataactgagttctacttttgattccagttatccctatctatgcaatgtgtaaatgctatttccatttcttcatttgtggaatgaaaaacatttcactggaaaattgtttttaaaaaagtacttgtaaagtacattggaatctttaggatactttgaacatggtgcttaaagaatgtaaatggttaatgcttgctttcatacccaatagaggaatatgggagtgggagtcacttgaatatcaaaatgaaactctgtatccatttttaaatacagtatgcatttgagcaaagcccttctccctaactgcttattttaaattggcagttgctcagccaacagtcagtaatctcagttagcaagtgtttggcacgcctgttttaacctgcacaggttcagttcacacaaagaaagggagggttgggttatgtgatgcaaacaccacgttagcctcattaacatattttgaataactgtatttgaatatttgccagctaagctaggccatctgaaggcctgccaaacaaaatgggggtttctgcgaggagtgcagagatttgagcttgtaaactttttactttttcttcttgaggggaaagattttagatgatgctatttagaatactttccataccctctcaaaagaacaaccttttttgtgtgtgttttaattctgcagaaattttggactttctctttctaccacctttttatatatctttaaaagaggtaccttaggacatgtctctgaaatacctttaggtaatctatcctgggtgggtttgagtttctactcagcctgtttttttgtctttgcagaatttagtcctgaagctctttctgtgagtctagctggagaacctcttctgcaaacttaatgtgtgaataccagtggttggaacagaacagataggataaactagggtatctgtaaactcctacctagtggatgcccagatcataaagatgccagcctggttcaactctatatagtatagacattgtttttacaagccttcagttttgtggcctgacatctgtatctgttcagaaatacttttttgactttgacacctgtctggctgaaaccacaactttggactctaaaactgggcaagggaggagtccattggaaccaggggttatcagatattttaatatacagggttttaagggtgagaacatgaggcagcatacacttagctctctagttttcattctgggggacaggtgaggggagtatcaaaatcaccagggaactctttgaaaatcattcaccttgattatttttttcctgtttacctgttgtgaagggtgggtagggatgacagtgtgatgaggtggcatttgaatctagaatctgcggaagctgtgggtgctgaccacagtgtggtagtttccatagtttgggccaatttgcaacctgtcttgtacttaccctttggaatagaaagatacagtctcatgatgccaactctcacccctccttaagtgtgtatttagtagtatttccaggaaatgattccttctaccctaagggctttttcctttcctttatctcttcaaagatggttcttaagacttagttttaaatcatatatatatatatatgaattatcagaaagagggaagaataaatttgagcattcctatttttttatacatgttttgtaaatctctcctttagtggaagggaaagaggatgcaactatgctgagaaatgtgtctgttatataaattgctattttaaaaaaccacttttaaaaactaagaacctaggaaagaactccggtacgttaaaccaagccctaaattttcaacagacattttaatgattatatattttatacgttgtgtgtacgtgtgtgtatgccttaaagtttttagattgaagttattaaatttcacctgtcttttgttgctcttaaatgatttacatgtaattttgtcagtgattcttacatgatcaccatctactcataattaattgtatagacacaattttaagtttcatagctttttttccagttgaattgtaacagcctgtttaaaagacaaatttataggcgattgtaatcttcatgaagcaatgtgagttgatgaatacctttgaatgttgtttcggtatttttcttttttattataaaatgttaaatatttcatttgtagagcttctctcatgtcaatttgttgtatttgacacaataggaatactcatgcagtgttaccagtttcgtgatatgcgttcaacatctctgaaggtggtgaatataaaatctgtttttcaaacaagtacacacatgaaactaaaacaatttattcaagtcctaaaacaacgttagtgaaacttcagttctgccactgtgcccacatttaagctgacagcatgtgtgtgtgagaagaagatacacattactgataatctctttagaatgcattaatattttcaggcccaaatatgagtattcagtaggttcatcagattaaaaaagctaaatgaaatttaaatattgacttgtatgtttcctttaattaattttggtgacttactaattggtatttgtggggatacgtagaattttttgaattggtgtttgtattctccatgttttagttataaagcactatgaagagaaagtgaatgaagaggctgccttcaggtgtagtaaggtttaacttctatcccggttccaacttgtcctgctgtcagcttgctccttagctccctggcttatttacatattgtataatccagactggcttgtcccgtttggtaggttggttataaactgcagagctaagtaaatgtgtgataacattttaaatggtatgagaagttaaacagtacttaaggagtgatgtcgtaaagaaccccagctgtcaggtgccccagggttggcctcctttggggccatttccgttttctctgagtaacaggaaataaatgtgaaactatagtaaattctggtcagatgatgaccccctcatccagatgagatgtagcatgctggatctgatactgaaaatgtttgatactgaaagtagattattaactatttccattaatgagttttgtacacaggcagaacaaatcaacaaaaaacccacggaagcatttttatctgtctttacccaatatgaaaacagtaaaggctagacaagtcctgttctcctcctccctcggtgtataatgagagaacatttccatgtgctttgtgatgaccatttctagtggctgcatgatactgtgtccagttgtaggattattgggtttcccaaaacatcactgctcttcagtgtttaacattatgaaaagttgtgccttatcccctgtgtgagtgctctaagctctctgtaaggctgtgtgccctggtcattgttgagtatgtccttttcatattcatttataatcaggccagccaaagattggaatctaatggtggatgtcaaagtctttcctagagtacctcttccttccctactgggtctctctgagattttcaggggttgccagtggcaaagggtgtttgttaacccctaaagtgatggtgatggtttctccctattgtgttatactgtgcatttgctccaatttcagggttccttggttcaaaggaacgctggggaaccctaactttgaagatctcaatttgacagcaacctgcctttttccatgagtcactgttagttcaaaatacccaaaaagagattctcatttctgtaggttgggcaagttgcagcctgcttgattttttagtgtctttggtttataatgattttagagagtagaagaggaaatggctgtttattgtatgttgcataaaactatatggccttgtgcaaatgatctaactttatatgaatcctggattgaagacagatgtttcttttgtataagtagattcaccactctgtgtcctactctgaaataatgagggggagaataatcccatatatatcacatcaattttaaaaaaccggaattcaagaactgggaaatttttcagtttacattctcctgattctgattttgtttcttacgttatttttctattttaaatttgcttttattatttgagataaaaaatactttgtttccattctaagttttgttttttgaactaaaggttaaaaaacctgcattcatggaattgttgccttttcagtggttaactgttagattttataatcagaagattgagatctttaaaggacaaaatggaaaataaaattaggtttggggtaaggaatcctacttggacactacaaaaatagaaggaaaaaaaggtgaatgaataattggcaaaacaaactctttttcctgtaagttcccttttcccaaattcttgccatcatgctaaaaaaagttgtctcgtgggttgatttttctcagaatcctgatgcttgttgttaataagaatttttttcatgtgccaaagttttgtttttcgtgtgacttctgcggcaattttggtcttactgaaaatatttttttaagtaccatggtaaaagttactggtaataagccaaaaggagaatttaaggtgaacttctatacaatttacttttattgactaggggaaatcaaatgcattgcccaaggtaattgaagtcagattattgtaggagaaatatcaattctaattaaaaacaaagtgtgagtgcttatttccagtttcaaaacttacattttttaatttctacctcatcctttccccaacaagacatatttttgctatcaggctaacataaagtgctgctactgactgagccagcctaatggaatggcatcactgtttctgttggcatagttaagcagggggttaaaaattcaagtttttgggaaggagtttttttttttggagggatttcttttgcaatacgcaaccttcagacattccagaaagtaactgtggatgcattttagggtatagccagtgtcctttgcatctttcagtctgataggcaaaatcatattttagattactattaaaacagcatgctgatttattcatcttgtccttccttttaagaaatatatttcagaaatgctagtaacatcttgctcagcagctcactctgacaccctgacttactcttactggggagatctcactgttttgtttgctctgcagatcttatagtggcctttgaccaaaggcaatgaaatgttacctgacttgcagtatcagtcaggattctcagttacaagcaatagacatctctgactaatttaatcataaaaggagtttattaagaatattaggtagccacagtttctctggaaaagctgagaactcaccttggcagcttatcagccaggatcaatgatgctgaactgatctggggaatatattgccactgcctcctggcacatgatcataggccctgcatcttgcaccaccagcacagtcacacgagaccccaaatgccaccaccgctgcctttgggaactgcatcactgcccctacctctggcccaggtttctgtacggttcttactatttgtaactgcttgagattctaaatctgggatggattatttggtggagccagtgtacctagtaatgtgactgcagtctgattgcaggggtggttgaaaaagcagttacttggagttttcagcttttgaagtgttgtgtgtggtttttttttgttttttgttttttttaagaaacatgatcttgttatgttgctcaggctggtcttgaactcctgggctcaagcaatccccccaccttggcctcccaaggtgctgggattacaggtgtgagccaccacccctggcctgtagtgttaattgttaatgattttccaaacataggaaggaaagttcagatgctgggtaacctaaaagaatcacataagtccaccctacatggcatactggaggtggaggtggaaggatagaaaaataaggacaacagctaccttcctacattacttaagatgctaataatagttatgagaaaaatgttataacagaacccatagtttctcagtattttcgtaatagcagcatccatatgttaccagaaaggggtcctgagccagaccccaagagacgggctcttagatctcctgcaagaaagaattcgagacaaatctgtggagtaaagtgaaagcaagtttattaagaaagtaaaggaataaagaatggctactccatagagcagcccgagggctgctggttggctatttttatgcttattacatgctaaacaaggggcggattattcatgagttttccaggaaagggatgggcaattcccagaactgacggtttctcccccttttaaaaagaccctaaggggtaactcctgatgttgccatggcatttgtaaactgtcatggcgctgatgggagtgtctcttagcatgctaatgcattataattggtgtataatgagcagtgaggatgaccagagctcactttcataaccgtcttggttttggtgggttttggccagccttttctgtgcatcctgttttgtcaacaaggtctttgtgacagtgtatcttgtgcccacctcctatctcatcctgtgactaagaatgcctaacttcctggcagggcagcccagtaggtctcagccttattttacccagccccattcaagatggagtcactctggttcaaatgcctctgacacataggcataatactctgttgaacagttgctgtgtgcttgatagttctttgttttataattttatctctgattcatacagcagccttgaaaagtagacattattgtccccattttgtaaaggaactgatgctcagagtaacttcccaaaatcacacagtgcatatggcagtgctgaaattcaaacccgcatgtatctgcttcaacacctctcttcctgctatcataccagcattcctcctcatagaaattttgtgaaaaagcacagataacctccttgatttaaactagaaatttttgagagtcctgcattgtttctcttaataatccactacttatcatttatcatgagttgtgagatcctgctaggttcaggagagtgactgggaccagagctacagactcaggagtcataagaccttaagagctcctgggtgctgtgggcattggtgaggtggtcctgggaagaacttgcagagtaagagaagtagtactataggacctaatgaaacatgagctggaggtgggttagaaagagacagagtggtttttatttggtagaaggaaaacctgaataggaacctgttaggggagcccaagagcatagttgaagaaggaaagtgtggttgggagccaggaaccaaaataggataaggtggaaaataagccattggagtggatggccaagcgggaagttatgctcgcctctgtagtttgaaatcaaatttgcagaatctttaccttctctgtgagtatgccatgaggtgcggtgatagaacccctgcactgttttaggttcatatactcagtggacacatgcaattttgtgtttgaatttttagtttcttgttttttaatgctgcctttgctctggtggtccttggggccacacccaggcagtgagcagcctaggtggactaggatgttccccacatcccaccctagagttacatctgttgctttagaggccatcatccctcgagaatgacttaaattcgtgctggccgtggtggctcaggcctgtaatcctagcactttgggaggctgagttgggcggacaggagttaaagaccagtgtggccaacagggtgaaaccccatctctactaaaaatacaaaaattagccgggcatggtggcaggcacctgtaatcccagctgcttgggaggctgaggcaggagaatcgcttgaacccgggaatcagaggttgcggtgagctgagaccacaccattgcactccagcctgggctacaagagggaaacttcgtctccaaaaaaaaaaaaaaaaagaatgacttagattcattctctctgtctgttattttgtatctgcccacattgatgttaatctgtcactttccttcctacgtgcatgggcttgtgaaatctcctgaccatttatgctatttgtttgtctttttgcaaatcaaaagagcctaatgtcaccttaaagcatcatggtaattaaacttaagaaaggatgagtgattacagtttatttaattcctccctctttagagaacttctagagtacacaggcatagacatacaaatttagtttcaagtaagaatgagagtatacctgagtagtttacataaaattatggggaaaactggatatgtgttggagcagacaatgtttgtggggctaggtgtccagagtcaagtctgtctcggatgggccttcagcagaacggctttttcctgacataggtgcagcctcatcctatgcgtgctcatcacaagagcatgtttctcctttgttctgggggatgggaatttccttcctttgattcctttctcttcactcctacagccccagtgtttgcttgttcactccccgcgtcccacatcaatgccagtcaactctggcctgcactagttggcatcgagatctgtgaaaaggagtagaagcaggggagacaaaaattaaagctctccctgcatctacttttttttttttttttttttttttttggagacggagtctcactctgtcacccaggctggagtgcagtggcgctatctcgggtcactgcaagctccgcctcccgggttcatgccattctcctgcctcagcctcccgagtagctgggactacaggcgcccgccaccacgcctggctaattttttgtatttttagtagagacggggtttcaccgtgttagccaagatggtctcgatctcctgaccttgtgatccgcccgcctctgcctcccaaagtgctgagattacaggcgtgagccatcgcgcccggccctgcatctactttttagttattggttcctcatcctctctaccccatttgtgaagcagatgcaggtagaggaagaaggagggggaaatgatacctaacattactaatattcttttctcttcatcatacccctactctccattcaccctcatccccattctcttttctaatccttcagtatctttcttccctattagactgtaagatccagaaggataaaagccatgtcaatgttggtctctaatgtgccccatcaatgtctagtacaagacttgacatatagaagacaccaagatgtgcttgcttggtgaatgagtgaggcatgaaagggggattgggggagtacactgtttttctctatacccctcttgacaactttaccctgttctgatttttcacctgtgtatcccccaatctctgatcttgaaggggcctgcctcctggccagcagcaagaacatggttcccacaatggatgctgaacacattttcccatagagcatttttctacatggtggttagtgtctgttggaactatactgtatacttaagggagctttcgtggctggccatagtacccataatgtacaacattgtttttatgggaaaatgcattgagttcaaatgaatctacttacatgcagacttttggattaaaacttttccgttagttggggactaccattacatgttctcctgtcaggcttttattcattactaatacataaatgaacaataagccatttttttggagaaagaccagaggcagaagtctttctttctgagattataaatcattacattaaaatgaatttcattcatccaacaaacattgctagtttatttcaaatgtatttatagggtgcctggcacatgtagggctttgtacaaaggaatcatacgtgaataaaatagggaccctatcctggtgaggtcatagtcagatttctgtttaaatcgaaattagcctcatagtccacaaggtcacttccagctctgaaattcagtaattctgtgatttttatgctgtattcatttgcgtatttccttgttgtatgtggttctgttatcaaatttatctttagataatagagaaagcatatttacattcattaataacaattaagagcagtaaccccaccattatagcttttaaataattctaaatttgttgttatttataaaaatgaaaaacccaggaacaaaccatttaattctagctttttattataaaaagagtagagccacatacattatgaaattgacataaaaatagaatgacagagacttgactttaaaagtttattccataaggataatatatatgggtgttgggattgcaaatatttttgtgttttttctaaatgtatttctgtagttttcaaagtttctatattaggtattccctcactatcagtaaacactgttattgttattccctcactatcacctcatatacatacatacatacgcaggcacactccttccttgttattgctgaatagtatctcattgtgtggatatatcacactttatccaaaatggactacactaaatattattattttgagacatggtctggctctatcgtccaggctagaaattttcaatttgaaaattttcaatttgaaaaaattgattttcaattcaatttttgaattgaaaatcacatggtcctcaagaccctccataatttcccaggctcatttctcttacctgtctctgtccacgtctcatgtctttcgtggttgggtgccattccttctttaaggactatctcaaatggtacttttttcccaaattttttccccttgattgaataacagtgtttactgtattctcactgtattttgtccaggccacagttttagcttgtgctttttgttacttgtataattgtctctcatttcagattctaaccatgagacagggacatttctgttggtatcagaaatagccttgcaaaggctggaatgtagggtaaattggtagttattatttctaattgggaagctacaaaactttgtctcaggaattaaggaggataactacattttgggagaaaacctatcttcccatccttgatacagtgatctaatgttgtgcatgtagttggaactcaataaatgcttgttgaaatggacccaatatctggtagtgggactggtggcattttcaatgtccctggaaaggaaattcgatatttatttatacaatatacttagaagtcctaagtttaaaagggagagagtgagaacatatgttggtgaaacgaagaaaatgtatataaagtacctctttgcaggaaagccccagagccattgcttttcacttttatattggacatgccatatttggatatggtcagtaaatgtttgctttttttttttttttctttacagaggtataagttccaataccttaatgaaacaatctgtaataaattctcctgtaagtgcaaaggctgagggtatgtcttccatgttttttgatgccctatttggatcaaccttaagtcagagatagaagtgcaaatcagatgagggttttttttttttttttttttttggagacagagtcttgctgtgttgccccagctgaagtgcagtggcacagtcttggctcactgtaacctctgcctcccgggttcaaataattctcatgcctcagccccccaagtagctgggactacaggtgcccaccaccatgcctggctaattttttgtattttagtagagatggagtttcaccgtgttgcccaggctggtctcaaactcctgacctcagtcagtccatccgcctcagcctcccaaagtgctaggattccaggcgtgagccactgctgctcggccagggtccttaagttcaaatcatggagcagtccacagagcactcttctcaggtgcagagtggaaaggactttgatcgtggactagtatttttagtcacatccacaggcctttgaaagggaaaaaatatattattgataggtcctgttttttgaggaaaaaaaaaaaacaagcattcctaactacctggcaaataatttcttctattctaatgataattaatttatgtggtcaaagatcagagaaagggagccataggcaggacagcagcccagtattggtaccacactcttagggatctcttaatttttgttttcttcataacaattgtcagttttcttacactgtgctgtatttggagtggatgatgctggtggtgattgtctaaaacttagatatttaaacagtttgaaaacttgttggagtaggaattataaaagctttatagttttcattatcttctccattcccactcttccaagttactacaaatatgcctaatttttataaatatatgcaatttaaaatgttttaattgtaatatacaagtagttcttggcagtagattccttcggagatttttcttcatattttatagagttcttcagattttttcctctttgcttataatacttataaagttatatttattttcttttgtctaaactcattcaatgtgcatttttctcacctgctcttttgtttgcttgctgcgatacaaggctgtataaagaaatacttggtgctttctgtgacagcaggccatataaagaaatacgaactcttttttttctttttgagatagaggctggagcactatggcgccatcttgacttactgcaacctctgtctcccaggttcaagcgattctcctgccttagcctcccgagtagctgagattacaggtgcccatcaccacacccggccaattttttgagatggagtcttgctctgttgcccaggctggagtgcagtggcatgatctcagctcattgcaacctctaccttctgggttcaagcaattctccagcctcagccccccgagtagctaggattacaggtgtgcaccaccacgctcaggtaattgttttattttttagtagagacggggttttgccgtgttggccaggctggtctcaaactcctggcctcaggtgatccacccaccttggcctcccggagtgctgggattacagttatgagccaccgcacccggccatttttttgtatttttagtagagatgaggtttcaccatgttggccaggttggtctcaaactcctgacctcaagtgatctgcctgcctcagcctcccaaagtgctgggattacaggtgtgaacaaccgcagctggccaagaaataccagctcttaccaagcactttaattcatttagtttttcactctggctacagtgagaaaagacaatgtttttacacttgatatactttttataagaaaaaatcaatgcaggatgaaaatatcctgttgctctagtaattcccacagaaggtcagcctcaataatagaagatgaaaaaagttttgtggtgtttgctgttttataaactcatatttggagaaggaacacaatatatatatgatttcctcataactgctgttggtgccccagatttgatattgttgcatgataacctgacattgcttcctgcttctgaaggaatgattggatttgaagccaacatgcttgctaaaccgggaagctgctattacagaaggcacaggaagtcaagctgcctatgcagttgtgctgagacatgagactcatacgttgtgacccgtgcctattgtatgtctccccatctttataactgcttttgaaaactggcttcaaataagcaaaaggcctagtgttatttccatagcagcactaaaattaatgaataagagttacagagttggctgaatataaaggagatatgtctaacaattacagttctccaaaacctagtgtgctccctctttgtccttgtaagtggtcaaacaaaaatggcataagcactcacttaggtgttgcattggtcagggacctggtgggaggcggatggcacacacaagttggataatttggggaacatttcataaaaagacagtaaaaatgtagggtatagtaagaatatacaagggcaagtaaaagggtatggggcaagggctaatatctgtacgtgaggaagaaagaggaggaaatgttatcaaaccactggctgtgtacaaatggctgccttataggagctgaggtctgcagtcaagggagactgtccactgagaacatacagggacacagccagcagttctgttccctgaccctgggctcttctgtctccagccattgtcccttttgactaaacacaaccagtgtagaacaaggattgttgcagtccttgacagatcagactcttcaggctcaaagagtacaaataggtggggagtagattggagttaagtggaaacagtcctgtgcagatgttatagtgagtgggatatccctgctgtcctcattgatagtacagaactcttttttttttaaattaaagttctagggtacatgtgcacaacgtgcaagtttgttacatatgtatacgtgtgccatgttggtgtgctgcacccattaactcgtcatttacattaggtatatctcctaatgctatctctccccgctcccctgaccccacaacaggccccggggtgtgatgttccctgccctgtgtccacatgttctcattgttcagttcccacctatgagtgagaacatgcagtgtttggttttctgtccttgcgatagtttgctcagaatgatggtttccagcttcatccatgtcactacaaaggacatgaactcatccttttttatggctgcatagtattccatggtgtatatgtgccacattttcttaatctagtctatcattgatggacatttgggttggttccaagtctttactattgtgaatagtgacgcaataaacatatgtccgcatgtgtctttatagcagcatgatttatattcctttgggtatatacccagtaatgggatggctgggtcaaatggtatttctagttctagatccctgaggaatcgccacactgacttccacaatggttgaactagtttacagtcccaccaacagtggaaaagtgttcctatttctccacatcctctccagcacctgttgtttcctgactttttaatgatcgccattctaactggtgtgagatggtatctcattgtggttttgatttgcatttctctgatggccagtgatgatgagcattttttcatgtgtctgttggctgcataaatgtctccttttgagaagtgtctgttcatatccttcacccactttttgatggggttgtttgattttttcttgtaaatttgtttaagttctttgtagattctggatatttgccctttgtccgatgggtagattgtaaaaattttctcccattctgtaggttgcctgttcactctgatggtagtttcttttgctgtgcagaagctctttagtttaattagatcccatttgtcaattttggcttttgttgccattgcttttggtgttttagtcttgaagtccttgcccatgcctatgttctgaatggtattgcgtaggttttcttctagggtttttatggttttaggtctaacatttaagtctttaatccatcttgaattaatttttgtataaggtgtgaggaagggatccagtttcagctttctacatgtggctagccagttttcctaacaccatttattaaatagggtatcctttcccgatttcttgtttttgtcaggtttgtcaaagatcacatggttgtagatttgtggtattatttctgagggctctgtacagaactcgtttttatgaagaatcattgactttcaaaaatacttgaggttacccagttcaagcatccaaaaatacagacttcctgttcattcagcatctagtttaatgtattcaattatggagagcaaaattttacattatgaaacatcttggctgggcacggtggctagtgcctgtaatcctggcacttttggagccccaggtgggtggatcacttgaggtcaggagttcaagaccagcctggccaacatggtgaaaccccatctcagtttaaaaaaaaaaaatgtatcttgttccattgttgaacaactgtagaaggttattcttgcattgaaatgttccttcctgtaccttctgttgcttgctagttcttccgtttgctattctcttgccttctgtcttttggtccctttatgacatttttggtgtttgtttaacaggcattcacttattcaacatctatttattgaatgcttgctgtaggccaggacttgttcttggtgctgggtattcagctgtgaacaagacaaagcttctgccttacatgaaacttacattgtagtaggtagagacagacattaagcaaatacataatatggtctctgtaggtgataactactgagattaacagcagttaaccatggtcacaagagaaaactgtggcttaaattgggtctgaagtcattctgagtcaactgtgtaatgcagtggccaaaaagcctaaattcatcttagactatttgaatcaaatggccatgttagagaggtcatgtttgctttcttattgtcaagctgagcctggtgtatagcatttactttttgaagagatattggcaagtggaaacttgttcaggggtatccccatgatagccttgtaaacagctgaagaaagccatcatatttgcatggagtgttccctaggccaaacctttctggttttgccaacagtttctcaaatggtatgatgtctatactctttaactgtcctggtcttcctccagataattaatttcctcttaaaatgatgctcccagaattcaactcatctttccagatgtggtttcaacttaggtaatgcttattagactatttcttcccttgatctggttatttaattttagtaacgcatctgaggattgaatttcctttaaaaacacacacacacacacacacacacacacacacacatctgtgttacttgactctcagtgttgagctaggctgtaaagccaggtctccagcacttctgttcgtacaatttatgtacataaatatgttacccagcatctctattaaaatgtcatctcatcgctgtctgtgcagtattctacattaagatcctttggaatattgtctttcatctaacttggtgttgtctacataattaacaagcatattctcaaacttcatctaggtgtttaatataattgtttaattaaaaaagaataatagcaccagacctttccttcagattatagcagctcaataattaatcctgttttagtatgacatttcaaataactgtgaacagccttaatatgtcatccattttacatttctgcattttatccaaacattttgaaaaatgaagatacagtcttcatttcatgatggcatttctatctggtactaggcttaacaaaaaacatactagaagccaggcttggtggctcacgcctataaccctagcactttgggaggccaaggtaggcagatcacttgagctcaggagtttgagaccagcctgggcaacatggcaaaaatgcaaatccacaaaaaatccaaaaattagccggccatggtggcatgcgcctgtagtcccagctgcttgggagactgaggcacaagaattgcttgtgccaggaaggcagaggttgcagtgagccgagattgcaccattgcactccagcctgggtgatgggagtgaaaccctctctctctctctctctctctctctctctctctgtaaataaataaatatatatatatatatatttttacctttctaacattgcagggagtgacctttctttttcattcagtctcagttatgtgtccaaagcattggtatatgttttggtttagtttttaatttgcaagctccatgtaagactacagtgggttttttgtcagatgcctccttatttatgagttggagtgaagacagggagagtattgacctcattcttcctggagatcttttttgttttccaaggagtttggtgtcgtattttataggattttctagattatatgtataacatcttgactccactcaaatgcccaagaacccatacattttggtggcagcatgactttcaagaggagttgcttctcttgcttagtacaaagtgtccatggatcagaatgtgattaaacaagtcaagtcaggtgacttgtcactgagggtttgtattggttgcaagtaccagaaatgtgcctgtgccgattggggaatcaggatattagtcaaaggaaaggaaaacctgttcaacaatttttcttgcttttcatgtgctgcagagaaaaggctaaatcccatctggtgcacactattgtgggaatcttatactttagattcataaacacagtatgttcagattttctagatttgacatttgcttgaatgtgttcggtgtgtattttatactgagtgtcaaatttcttgccttttgacgatagctgacttttagttgactaaaaaagtagtagtcatagttaggtttactatctgtggctatcacagggttcacatgggcatcattgtccaaccaaagttgcttctgaagtgctgccatacagtcttggctctcatgaacacttgtcctagtttttaccgttgtcctggaagaattactttcacgagtgtctgggtttggaggaaaaattgtatggctcctatggatacgtctcaaagtattctaggaagcaagttgttcccattgtgcagttattgctttgacatctggccttccttacttacctctgctacagaaagaatccagaatgacttgtaaggctggtaaacccagtgattcttggaatactttttcaagaatgctcctccaggaatgctcttggagtctcactctgtagcccaagcttgagtgcagtcgtgtgatcctggctcactgcaacctccgccccctgggctcaagggattctcatgcttcagcctcctgaatagctggaattataggtgcccgccacaacgcctggctaagtttttgtattttactagagacggggtttcaccatgttgcccaaggtggtcttgaactcctgagctcaggcgatgtgcccgccttggcctcccaaagtgctgggattacaggcatcagccactgcacccggcctgaaaacacattttcttaatgggactaaacttttctagctgaattgatctattttaaaacttgccaatgaaagctccttagtagtatctgctaattaaatgcagtttttatacctaacggaccttttaaagaatgtgtgcactttgcaaaccccattgcttcttgccgtatctgagcacttgccacctggtggtaaggagaccattccatctccttcactagatggtagcacctggaagtcagggatcattgctgacttatcttgcctcccaacattgatcatgcagtaggtgtggatgagaaagagggagataagggaagaaagggggctgtgaataaacgctgttgctttctgcttcctttttaggagttaaaagtctcttcagctacctgtttaggagtatgaaagcaaatctaggaaatggcctctgcagttttccgaatatgacaaatcatttagtttcctaagcttgttactctacagtgggacttctcaacctctgcactgttgatattgtggcctggatgattgtttgttgtgtggcctgccctgtgcattatagggtgtttagttagcagcagcatccttggtctctgcccactagatgccagtagtgcaccccatccccagctgtgacaacaaaaatgtctgcaggcattgccaagtgtgccctggaggcaaaatagccgccccctaattgagattgagaaccgctgctgcataggagctcctgtctgggacaaatgcccaccagagaaaccagcaagtaatagaaatgtggctttggaagggaacttagaaatcatctggaatgttgtatcctggagaactcctcgccccacaccagcgccagcacccctccccaaccccctacaccacctccacctttatacttatgctttatacctgcagaactataacctaagggaaggaatgaatataaaaaagaaaaaaatacaactatatgaggtaatactgtttagggcttgtagggttatttgttttaagtttgcttacagatcatgaacatgtgtctactttcaggttactcaaaataagaaagcataagcttatagaaataggtcagggagaaaaacacagaaaaactaatgtgcagcactactaaaaaagaattcaaggtgtatgttgaacatttttcagattaaaaagaactcactggaatgtggctggattgctagtatcgccctgtggagctatctgggcttcatatgaggctattctaagtacatgcatcaaaaaagagatatagaagagtatttaaagtaatgataattggcctttttcaaaaaatgacttgctttctaaacctgaaaaatagccatcatgatactagagaaatagctgagatattaatatttcctctgtagattgttttgttttataagggcattttgtgtcttactaagaaatctcacataaaagtaagaacaccaaattaaatattagctcttgtggttattttaagactcatctcaataaccaagagaatttggttctcacactttgtaccttttgattgtaaacagctttaaacaggtttatgttgtacttcatcaaaaattatagaggatctgcagactgagacgcattgggactgaaattaggcaattcagagtttctcatgcatgtaagctgcttttattttgatccctatcattcttagtctgtcttttcaaatattctactggaaggactgttgtgagttgagggcaaaggagaaaatggcagggtctcgagccaccaggcctcataatacctgctctttgaggtagagtaaaagctaactgatgaatgttttccagaataatatttagatttagtctggtggtttttttttttttcttgttttgtttgctttggtttaagctcaatacagtcacatctgaatttacacaacaaaaatgtttccgaaaagttgtggatgaatccatttttaataagccaagtactataaaaagcatcagaagaacttgttaactgaacttatcctaatgttctgatcacctgtttcttttaatagacatagtggttgcaacaatgctttgattagttcctttttggaagctggcttttgttggggggagggtttttgtttcttgtatcttaaacttgacaccttgattctcattgaaaaaactttcaaccatgtatggttggtgatttgttgaaatttataactgaaaatctgccactctgcttttagtatttgaaatgccttggcagggagacgtttttctcagaacagatcttttggaggacctcaggaagttaattattctggcaagaagttctttttgaacttttttggatcattatgatattatgctaatttatctaaaaaatggattctaagttgaataactgtatagtcctggcagataagagcatgtcagatgtcttggcacagtttggggacagaggggactttcccacttctttatgtaatccaccatcataatgtgggagttttatgaaatttcttctgttatacagaaatacttagctttttaggccgtatgtgctgctcagtgaaaacaagctctgtgtatgtctgtatatgtttaaatgaaatgaaaaagagaagtgaaatccaagaaatttctggtttgcagtggtgattatttttagccacgttcatgtgttttaaacaatcccttttaggtctgttgaatgtagcttggaacagaacgtcccatagaaatgatagtatagtacacgtggtggcaaagtttccatattagccctcaaagattatttaactcatcatatactcacacgctttgccgtacaaggggcaatgatgtatagcgtataaaaacactgtttaataatactcaacctacagcaactttcaatactaagaatgaaataaaattgaaaaattgtaaaaatgcataaggataaattttgtttctctgaaaaggttgcttttgaggaaaagtagttttaaagagacttggtggtgtggtagaagaactcccagcagacctgaagatgtagcagatgtatagcagtttgggcatcttggacaagtaaatcatactcgcaagcctcagtttcttttaatgtcatggggatagttgtgtggatcagagcagaatttgtgtgaaggtgatttgcaaactgtaaagtcctatgcaaatatacaatatatgttctggttcttttcttaattatgaaaatcttgtatcctggcctttttcttgacactcatatattagtaacaaaaatctttatgcttagcaacaattagtaaggtcctatttcgctcacaaatacaataaatgcatgttattttgacctacatggatgatagaaacatttgcttttttgtgacagcctattggaacttccaaagtgtctctctctctctctctctctctctctctctctctctctctctcgtttttctagtctctaaacctctcttgttttttctttgtctgagtatctttctgaaccaccgtctcaagtttcaggttatacgacagagctcatactccaagccctggcctctctctgaccttgtgcctctggcctgggacaagcttcacactgccagactctgcagctgaccctttgtatctcccagtagtctgagcagcattcatttgctcaaggtctcaccagagaccaaacaggggcagcctctctggagagaccatggcctcccaacagtatttttgatgtcagtggcctagccttaggccccgaagccaggaactagatgtgataggggccaaatcccccaaacccgaggagcttttctggtagaaaatgtgttatgaaaaaaagggggactcagtggccattgcagaccaaagcctcattcattgaggtggggtaggggttgctggggactacaattcagagttatatatgtaacagagttatgcatataattcagcaaacaaagaggcaagttgaaaagggtttattaaagtattaatgtttgtgtcaaatgtataaaattcaggaaacaggcagagcaataacatttaatgttggaagaggacttagagatacaaaaaatagagtttattcattctggagcagagaaatcttaagccggataggttaactgatttgcaagtgtctcctgccttccaatcctgcatccttaaggatatccttaagatgatacatctgggttttgcgatgctctgttctccaggtacggttagcagtgattttgcataactatgtgctgagaccctaggatctaacaaactataaaggttagaaatgaaatatgaggtagcctactatatcagccacctctgattcccttctcccaccacagggagaattagattgaccggctgatcgattgcttgattgagacaggatcttgctctgtcacccaagctagcctgcagtgatctccactcactgcagcctcgacctcctgggctcaagtgatcttcccacctcagtctcctgagtagctggcactacatgtgcacaccacagtgcccggctaattttttgtatgttttgtagagacaggattttgccatgttgcccaggctggccttgaactcctgggctcaagctatcctgccttggcctctcaaagtgctgggatgacagatgtgagccactgtgcctggccagtaatatgtattaagtaaggtaatttgtaggagcttagagagaaccagcaatatgacacagtttctgctcttttggggcttacaatacagtattatatcatcagagggggtccattctgaaccataccttgaattaggcattagcatactagattctaattttgtttcttccattgaatttctaacgtggaccctggttaagtctaagagatcatttaaatcgtgggcctcagtttttttattcataaaatgagaatattgacatgggcctcagtttttttattcataaaatgagaatattgaatcttgaaaccctgttatttttacattctgtgtacaaaagtctcatggtactatctttaattttacttatcagattttgaatctctagtgctctttttatttcaagatattcttagccaagctataaaatcaaactaatttatatgctgttatgaggcaacttagcaattcatataaccacaggctagagaaagtttggacatatataatggttcatttcttcaattttaaggcagaactacatcccaagcttatgtaaaataatttgaattattatatattcccatagttctgcctcaaataaaatataactgtttttgaaaattcaaagacttagaaagtaaattagaggattgtttattataaaagaactttggaccctacaaaggaatttaaccacagttttcttttctttgttaatagagtctcactgtgttgcccagattggtcttgaactcctggcctcaagtgatcctctttccttgccctcccaaagtgctgggattacaggcttgagccaccactcccagccaacagaattcttttcaacagtgagttcctctagtgcactgaaaatgtaatatgatttgcagatgtttagtttatgtacaccagaaagaaatagttacgtatatttacagttcatggttctctgcagcagcgctgagtgtatgccagatatgctttccgttaactaattgtagggattttctgtgggttgagagtttttttgctgttgtgttggaattttactgacctatctttcctccctctccatgttcttcccagtagttcaaatagcattcatatgtaaaatgactggttaaaatatgggagatcatctctggctgttggagaagtcacccatttaggggatcaacctgtgactgaggaggcaggacactttctgtagtgggaggaacatgggccacatacaaacagatttagttcaaatgccagtgctacctctcccttgcattaagcaagttactgaaaccttcagaatctagttttcatctgtaatataggaataatgatgataatgcttatatcaccagggaatttgtctttctgaaagggctagcacacagtaggtattcaatgcaagttagcttttgcccttgccttcaaatccagggaacacatggcagcaacaagactgtagccctgggagttgctatgtctgcagcctctttaaggtgttaggcagacaggatgtaagcactagaaagattcagtatggtatcaccggctgtagtggttcagcccttggcctctgtagcccaagagccagtgttcgggtctactaactctgtgctcttgaaatgtctcctacttttaagtcagtttccttatctgtaaactgagactaatggcatttacctaattgggtcgttggagatcaagtaccttaattgatataaagtgcttagaacagtccctgggaggtggtattttgctccagtctgttatagggaggatcattttgttgttagagttcagtgaagaccgttttttaaaatcgtgtggaatgactataggcattataaagacaactgaagaagctcttgtttctgaacagtacttggccagtttctttaacaggagatggctttgcttttagaagcctgccccagagtcttccatctcttccactctccctgcacgtccgctctgtatggcttttgttattaatgtggagcagttgaagtcactgacttgggtgcaggccaggccagcattactgaggtcatatattactttcctagactctagtcatgaacaggatgttggaagtcagaggtacagagaagctgcctttttaggccgctcacatgaaaggtgtgtttgctttcctcaatcatttttatactaatagattggaatcttattcagtatcttggtagcatttttttcttttactctacaacctttatgccgccaggctgtcatttggcttattctttggttagacagactaatgctgttttgttatgcactttcttcattgttatttcattgttgaaacatctcttcctcggttaactaaatatttatttaaggcaggtagaatttctcagtgaagctgtatatttgtttaggtattatagatatattctaaaacatttagggattattcagtctatatatttttttctcttggaaatgaaataatactgtggagaaagtattcattgaaataacaagtgaaagtgtgtttccctcaggaatagtgtaaaaagaacttgcttttattttctgctttgcttttgtatttgggacttggggaaactatgcttttgttattttggaaaagcaatggaattttatcagacattttcctgaaactccctactttctctttttcctgaaatactaccttcaaagtcctgttttgctctgttaggaggttccatcattcaaaaagtgaaagagcttggttagttgaggttattttgttgatctgttggctttaaagaaagaagagactgtcagagaaagtctgagaaacaacacttggaggatcatatgaccaatagtgtgaaactgaggacgctgatttgttagcttgagcagttaagactttttttttttcaatgtctgcaagtaaatacgtggcctcagaccctgttatgctttatgatgggtgagagtgcagagaaagtaacgttctccaggtttaaactttattctgactctgttccctaatcgtgaggatttttatgttttttgtaactgttgttgtgaagtagaaactgatttctagttgactttggctattactaaattgtgacatgcatgcacttctttttaatttaacagttgttttctgctgttttctcagtttgaaagtagtaattatgaataagaattcctagaaatattcttcttccataatgatatgtcacagatgtttgagtgctacacacacactcctctccatttttaagtcaatttagtggagataaaatgtagataatagctgtgtgttgtaatgactctggcccactccccagaggctctgtatttccataagttatgggacccctctgatctttctgaaatggccaccatcagatcattgagacttgacatgcagtttaaaatgtgtgtttctgagatttctatatatgatttggacacagaataacttgtgctgtttccaaaaccacattctttgtcctcttatagaacccaatgaaaggaggaagctgtgccttaaatgtcatgttctttatgcttagttcctttaaaaatgtatacttttatcatttgttatagtagaagattttgaaaattctgagaagtgtaagaaaagaaaaattacttgtaactctactactcagagaaaaactgctgttaaaatattgaggtatttacttccagactgatttttctatacatatttatatagctatatatagttattcttttgtaagagtgactataaactgttttgaaactggcttttttaacataacaatatatgtgagcacattttccacatccccaaatatttttgaaaaatatttcttttaaatatctgcatagttttgtacccattataatttggctctggaagaagttcaagatatgccaaatagtcttggcacaatggctcacacctgtaattctgacacttttgggggccgaggtaggaggatcacttgaggccaggagttcgagaccagcttggtcaacctagcaagagctatttccacaaaaaagtgaaaaaactacccgggcgtggtaacactcccatagtcctagctacttaggaggctgaggtcaaaggattgcttgagcccaggagtttgaggctgcagtgagctatggtcgcaccactgcactccagcctgggtgacagagcaagaccttgtctctaaaaagaaaaaaaaaagatatgtgaaattaaaaagtccactttggtgataaggtcttccttctaaattatagaaataattggcttaaaagggaaattgagaacatgctaactttgtgctttattcaagatagacttgtttattctttgctgcatttctataacaaaacatttcagctgtataatccttggtatagcaatgactagttataataattaatttttaattagctgttcatgaagttttcaaaacatcaacttttatcgcattaaaaaagtgaaataattttgaaacatttctttcctttaaatttgaagtaaggttaaagttttttgcaaccaaatttggggttcatctaccatggtaagttggtgctattggctgtgctataatttcagggtgaacttgactttccttgagtttccaggctgtacaggacaggaaaggctgtggccgtcagggaaatggagccagatggtcctcatgatcgatgccaagctcccaacagagacaaatgctacacccgacagactaggggcaacagcacatgttagggtgattgctcaccctttcctggagaggggagagctcttcccttctgctggtgtattttgcagctagtttttgcaggctctgttcagtctggtgtagcaagtgtccaggcagttaacttctaatgggcagtgaaggaggaggtgatggcagtagctggggccgagttggcagctagtagggctgtctgatgaaatccacattttggcatccttgaagtctttcaaaggaatctgactaagtcacttaaccttgtgtcattttggtttacttggcttttaaagggtagtggtaattaaaccaatgggagccattagttagtagatcttagtggcagttttcagtttaaaaatggaaacctacagtcacagagccattgactcgtaataacacagtggcttgtccttgacccaagggagttgatttggggaaatgaacatatctgagagtcctgtgtcctgagtttatatatcagcatagctacttaggagcagtatcactttgggcatatttcttaacctctctgaatctcctctgtaaaaataatcataattcttcaaaacataagtgagagcttatattttatataagtatgtggcacagttattagttcctcactagatattaattagttcctatgaaaatgatagattagtgccaagtcatctgacctccctgtgtaggcttattattgatcactgggggtctgtagccctggaacagtgttttcttttctgaattaattacagcctcatgtactgagctaaactcgaatatgcaaatctttatgaaaagatgcccaaaatacagtgacttaaacaagttaagaggttgttggtgctttcctcctctcagaagagctcaagggatccatactgattcaggactagcatggtacttcaatagaaaaattccttcctctcgtttctctgccatcttgagagagttgccctcatcttcacagtcaaagatggctcaccatgatctcatttcagcccaagggaaaggagatgatctacaagttgtacagatcattttcatttacatcctattggccagaacatgaccacagcaagcttcaagggaggctgggaaataaaatgttagccagcagacaccctgctagagcttctgttactatagaacaagatcagcaaacagtggtctgagtgccaagtcagccagccagaaattatttacaaattaagtatagtttgtaaataaaagtgtattggccggttatggtagctcatgcctgtaaccccagctcttggggaggtcaaggcaggaggatagcttgagcccaggagttcaagacaagccggagcaacatggtgaaaccctgtttatacaaaaatttaaaaaaaactaaccaggcgtggctgtgcgcacctgtcgtcccagctatttgggagactgagatgggaggatcagtttagcccaggaggtcaagactgcagtgagccatgatcacgccactgcactccagcctgggcaacagagtgataaataaataaaaattaaagtgtattggaacacagatgtgcccatttgtttataaattacctgctttcacatggcagtggaagagttgagtatccaaaatgcatgggaccagaagtatttccgatttcagatttttttgggattttggaatatttgtgaatacgtaatgagataccttggagaagagagtaaagtctaatatgaaatttatgtttcatgtacaccatatgcatagcctgaaggcaattttatataaataatattttttatttttaagacagagtcctattctgtcacccaggctggagtggcagtggtgtgatcatggttcactgtagctttgacctcttgggcacaagtgattctcccacttcagcctccccagtagctgggactaaaggcatgcactaccatgcccaactaattttttgattttttatagggatgaagtcttgctacattgcccaggctagtttcaaacttctgggctcaagcaatccatctacctcaccttcccaaaatgctaggtttacaggcatgagccactgcgcctggcccaattttatacaatattttaaataattttgtatatgaaacaaattttgattgtgttttgactgcaacctgtcaaatgaggtcaggtatgtgaattctcatttgtagtgttgtgtcagtgcccagaaagtgtcagattttagaagattttggattttcagattagtaatacacaacatgtagttgctgcagagatcatatggcctgcaaaacctaaagtatttattatcttgccctttacagaagatttttttgttgatgtctactgtagacaatggggaaatgaacatgggaggagcaactggtagtctctgccacagtaaagagaatgataagaagggtgaatcactgcctttgaaatgtagagttagaactttgtacttaggcatactagtggcccatggggcagtgagttggtatgcaggtgattggttttttgttgttgttgtttgtttgtttgtttgagacagagtttcgctctttttgcccagactggaatgcaatgatgctatcttggctcatcacaacctctgcctcctgggttcaagcaattctcctgcctcagcctcccaagtagctgggattacaggcatgcgccaccacgcccggctaattttgtatttttaatagagacaggatttctccatgttggtcaggctggtctcaaactcccaacctcaggtgatccacctgccttggactcccaaagcactgggataacaggcgtgagccaccatgcctggcaagtgattgttgaagaagcaatgttcagggacagatttgaggagccaggcatgaagtagcctggtggaggtaaagggatgaaggcacagaaggctgcttactgacgtgagcttccatctttaaagtggagcatcctaactcctggacttttccctcttcctgcagctcactgctctgtcttgcattcgattcttgcttatcagcagtgccacccctgtaggtcagactctttcctcccattgacttcttacgggtctccctgcctggacattcaccctcctccacagtcacctcctctaagtgtggctcttatattagtcccatctcaagaacttccaaggagtccctgttacctactcagtaaagccaagcctctaaggtcctcccgctccttgatcctgatcttgatcctatcctgtcttccttcacagtcttacacacaccctagattccagcccaacagaaacaccttgtgcctgcgctgtactttgccaccaccacgtatttgctgttgtctccttgcttctgtccaaagggtttggggatttgggactatggcttagcacatggtagaacattcatggctgggcagagggggtttctgactttgttttggcatctctctacatctgtatttccctctccagcccctacccccttcccttacaacctaaggataagcgctccctttttgaatgctcccttttttaattataccaagtactatatataactcccaaggcacttactgctttctgtgtgggattatagttattccatgtatgtttctaatcttcttgcagagaaagaatctgaggccaagtccagatctgactgatcagtttcatctagtaggtgcctagtggctattttgttgatcagtgttgcaatgatggtgtctacaaacagtgctacctacaatttagtgtgtttcactaaaaatgtaacttaacacctggaggaatttaagtgcaaatgcaaatagaggtttttttgtgtgtgcgagacagagtctcgctctgtcgcccaggctggagagcagtagagcgatctcggctcactgcaacctccacctcccaggttcaaggaattctcctgcctcagcttcccgagtagctggcattacagacgtgcgtcaacacgcccagctaatttttgtatttttggtagagatggggcttcaccatgttggccaggctggtctcgaactcccgacctcaggtgatccgcccacctccacctcccaaagttctgggattataggcatgagtcactgcgcccggcctagagttctaataattgtgttgaaaataaatgccacttaagatcttaaaaacaccaatttttaggtagtttttagcagaaaagaaaaaaaaatctatttaactgttttcttcagacctgaagcagtatttaaatacattcatatttagaagttttaaacagttccttgaaaagccaaggctgagccagaaatcaggcagagcttttgcaaggcataaggaggagcatgtgggcagaaacccctgtgagtgcaagaggtgggccacctgcaggaaaactgcccagtccactctgcagagaaggattggagcattttctacaccagcctgccagggacacacctgactgcacaaagatccatctaaaatcactcacattatactcacagaaggtggtattttcacagcttcatctttccgcagttggtaatcaaatgtaagaagagcttttatttttataggaatgatttagcttatggagtaccaatctcatccttttccttcctctgtctttttaaccaagcatagaatgaggagaccaatgtatataatcaaatacttgcgtatgctggaaaagaatttatgtcattcactcatctccttttaattaaaacctagtgagattggtggcaatgttgggaagcagatggatgagcatgaatttcaaatgtgtatttagaaaaattgaaaggattggtaggaaagatattaagtaggcagtgtggtcgggagttgaacctgtgagttcaacagcaggcgcttgtagcataaaatatagtagtgcttccagacccctctgacctagggatgtctaagagataaggagggaaagtgcaggggtctcttttcttgtggtttatgcattttgaagttattaaagcataagacaatttgttctggaatttttactcaagataaaaactatgaccattgtgtgaacattactgcttcacctccctctcctaactctacttttgtttactattccatatccagtgtctagcagtgtactcatcaaacagtaagtgctcagtacatatttgttgaatgactaaataagtggattctggcacttaattataagagctttttggaagatgaaaagattcttaagcaaaatgattttttaaagatgtaaagacaaaagaagcttatcttccagtccccttcctcacttgactctgccagcccccttcaatacatgcctcactggcacctctcctggatttagctttaaaagtttgggaggagtgaaggtgtgtgtcctcatattactaaaagaagaaccctagtgttgtgtaacagtgtttcacaggctctttcataataaacataatattagacacagccaaagtaagttcattttgaattaataatccagtatttcatagtgctggttcgaggtacagatctaggccttgtgtgcaacagaatagaattttagaagtagagtaaaaagtttcatccactaagctgtttctcattggcctgcagtctgatttctttcaaagttttggagtttaacacaaatttaggtgttcagctaataataagattaagggtgtttgtgggcaaaccaaatataatttatatcccttaattttgagctcataatgtttctgctctgggtttataagagataccaccgaagaaaaatctcaattagagtgagataatttgtaaagtaataagtagggttttttttgttttttttttttaggaagcacactagtgtagtggttaggtttttgactttgcatcatagagacctgcagttgattattttaccaacctcactactcttttgtctcaaccctccaaatctttgttttttcacctggaaactgggaatagtaacagtactttcctcagagactcattaataagataattcatgtaaaacacccagaacagtgctacataatagtgttcataccagttatgattaagcctatgctgctgggccaaagagcccccaaaatacagtgaattaaagggcatacaactttttttatattgctcatataaaagggtaagcattccaggcttgcaaagaatcatgttctttgcagaaattcaggcacccagatttcttccatcttgttgctccatgcttcctacatctcagggttcatctacatagtcaaagataggtcgcaggtatgtctgtgtcccagcttgaggggacaggaagaagtgtggaggcagcatgcgcaatgtcttcatgctcagtcctagagaaggcacacatcattgccatgtactttgcactggggagaattaagtcacatggccgcccacatctggctgccagagaggctgagtggtataatttctacctggatgaccatgtgctcagttacaattcattcattgtggaagaacagaagaacagatttgggtgagcaggtaatggtctgccccacagtgcttaataaatgcaaccattatgtatttatttaaaaataacatttcaagtaacagtctaaatgtctttgttctggggaagaggaatcaaagagcttctgtaacacagaatttgtgctacatagcacatatctcccataagtgttatttttattttttggaagggagtcttttaagtattgaacttcaaatcaaggtaaaccttgagggagaaaagaaagagtggataaaaagcagtagaagggatgggaatgtattaaaaggaatgaatgctaattagctatatgctcttccttcctctcagccagccatctgggcaacaagaaaggcttactacagttagataaatttaaccccttctctgacctggcaaggacaaagtacactggcttctgaagaaactttttcttgggagcaaggtagttatttcaaagcacagaaaaaggcggcggggggcacagagaagcacagagaagcgggggcagttgcacaggtaaaacattcatcttggcttttctttttaaaagataaactttgtcccacgtaaagaggaaaactgcatagatattcattgagattatctgatttgtcactgttgccaaagaaaaaacaaaggtaaaatacacgagtttctgcattcagaagaaagtatttcaggtaaaaattaactattaagcaacttttctcagcagaagaaatgcccaaattcttaaggacagccaagttgtgagttagagagctagtgttataacagatatttttaaatacatatatgaattacctccttacgttactttattcttgtgtttttagcaactgttgaaaacaattataagaaatgaaataatgtcctgagctgccacatggtatgttttaaaatctgcgattttattcttgacaagtaacatacactacatgcttttgtgtgcaagtaatgctcagatgtttgataacggagtgatcttaaagaggaggcatctgtttttgtttttataagtagttcattgcctaactaccaaaaatagctgcagttattttaaacagatggtcccaagttaatagggaagaaagtagaagtgagtctatttccccagtttttatttttaccccacaaaaatggtaaaaataattaacagtatataatttgaacaaattctatcagaatgctttcttctaagttattctttctgagagaggggatttgtcaattgaagtatatgatgtggtggagttgaaagccaatataaattgcttaaatttctactttctgatagcgttcatcaaaatgattgctgcattgttgaaatagagcttttgatttttaaaagacaattaaattgtggtaagatacatgaaacctaccaaaacttacttcaaaagttttgaagtcttaagagggtggtaagtggtggtggtgacatgttaagagtaggaccttgccagatgaccagaaagaatatgggttgatgacattaatatttttatgatttctgaattcctcaggagtcctaagttaatagttaataacctactctttagtttctgacattgaagataatgaatattttgataatgcaacaacgaatttgtatttataagggactttgaagaagaatgcatttgtgtggtatacagatgctgttactatacatcagtttcagtagattacaatagtacttgggcccaactactatcgtatatagctatccatctgtaaagaagatggatatctgaggttttttacttctgaaatactaggctgttaaagcttactgagatttttactttctattagtgatagcagtacctttttcatgtctatgggctatatttccatgtatatgtccacaaagtacctgcagttctttgattttgatttttgcattttctttactgtttcatgtggactatgggctgtaagctgcttacattgaatctttcagttttgcttctgtctgaatttgtctagatgaaaaatactagactggctcatatgaaatgataaaattgtagaccagggtagcaaactatggcctgtgggcctgatactgtttaagaaggtttttcacatttacaaaggtttttttttttaaaaaaaaaaaaagaaaaaaaaagaatatgagacagaaaccatgtgtgtagcctacaaaacctaaaatatttatgatctggccctttacaaaaaggtttgctgtcctctgtcatagacaaatagtacagtgttaagtggttaagggcacaggctctgggtgaggccagactactaggttcagatcctggctttactatttccagtatgacctagtcaagttacttaatgtctttgtgactcgttttctcatctataaatgggaataaattacagcctacctcatagggctgtgatgaggattaaattaatgtataaagtgcatagaacaatgtctggtacttaatgagtattcaataaatgttaataattgttattgcattggaaaaaatcttgaaagatcatgtaaactaattttggctttccagtggtgagtgtccgcattattaaagaccatttttctgatttctgcatcaagagtggagggtcattttctttttaatggtgcctgctttacccaaaaaagaaaagagaggcccatagtcaaatgtaaaaaaatgcttgaaaacataaaaaactgtaaccacagctgctttttaagaaaaggacaatcaaagctctttgaattaaatgacacttaaaaaacagcacaaagatccttttacatacttaggacaagcataagaagaaataaagtggaaataaaagatgtggaagataatgttagaaggaaggggaaacaggaatgagaaaggtagtcagcagctgggcgctgtggctcacacctgtaatcccagcactttgggaggccaaggcagacagatcaggaggtcaggagatcgagaccatcctggctaacacggtgaaaccctgtctctattaaaaatacaaaaaaattagctgggcatggtggcacgtgcctgtagtcccagctactcaggaggctgagtcaggagaaacacttgaacccgggaggtggatgttgcagtgagccgagatcgtgctactgcactccatccagcctgggggacagagtgagactctgtctcaaaacaaaacaaaaaaaaggtagtcagcagaagaggagaaagattcggatcaaaagggaagctggaggtttttcaaggaagtccagtgttgacatccctccttcccttgggaacccacctcagttaatctgtgtgtccaatttaaatgcttccatttgaagaaaagcctgacttgtttattttctattgcagaaataaatttttatcatcaagtaatattaactgaatatacattatatgtaacttgtgttccctcagaaaactgatcacatgtatacaaaagcatcatattttgtatctttatttttaggtcaagcaattctgtaccccttagccacttagtttcatcatcatcatcaaacattttttgggttcctaaatatgtttcttcatgtttaatacttctttattctgcttgttctttcaagtagggaaaggacaaacttaattatttacaaaatgtagacgatggttaaaaaacaggaaaaaaatttaatgaagtgtaattcattctctctttttccttcttttgtactcaggttgtttattctgttgatggatattggactggagtgatgagtgttctaggatgggtatttgatgatgccaggggactcaagtaatggctttgcatgaagattacacagtaaagctgcacattgattacctcatcttattagctgatggagatgtttgagaggacaagattgcagggctttcaagcctgtacagctaccaggatttgatcctaagagcttgatcattgtcattgcccatagggactgtgttaagaatagtggtggtttactacttaaacgcatgagagtgttataacagttccctatgtcttttgaattgtttagataaggttaggactttcagatcaacttgagttttaatttttagcatttatagaattctaaaattaatcctgtttgtttttgtcttcctccactaaaatttaagtttgctgaggtagacagttttgtttctggaaccactatccctccagcggctagaacagtggaacatgttcaataaatattcaataaatatttttgaataagtgaatgaatgaacaggttaaatgtaatctttattttttaatgaactatcctttccagagacatacaaattgccagttgatggcattttttatttctttttgtaaaaagagtattttaaaatttgaatgagttctatctaacagataacacagttgagtacattaaaagggaccttgaacacaaaatccatgttttcgtggattagtatttttgcagcttaaatggtgaacgataggattgttagatgcaaataactctggaaattaaagacctttagttgtaactctccctaaaatgtttgtgagagcttgtaaaatgttgttcactttattctattataaaagggcattataataaatatgaagttttgaaaccatgttcttttaaatgaggtgaattatagaactctgttattagccattatgctgtgccccttcttttaaagcatatccctccacataccctttctaaggacttgggggtaacaaaatgaggagtaagtgaagaaagaagaaggcacagcttgtcgagattgatggaccgccccccgcccccgggagagcagcgtaggaaattgcaggatgaaatttgtgtgccagtcttgtcagcacccattcctgttgaaggagagggcatatggatgaggtggggaggattccagcagaggggacccaggaaaggggagggggtggggacaacaggaagtgtaatgggaggcttggggaaagttgaagatctgataaaggtagttggtgaggtgaagaaaggagaatccactaaaacttgaccctaggagcattctccgccgaatggcatggggtagtgaccctgactctggacaaggagagaagcaaatgtactcctagccctacttgggaccttaaggaaagactcatccatggccatgatagtgtaaatgctgtttattggttttaagctctttaactcaccctttggagtgaaaaacaatagaaagttaagctggttacagaacagactgtaaatgttataaaccttgaaaatgtaaactatagatacagcagatggaaattaggcagtggaagggcatgaggagagatggggggaaaggatgaaaactgattgttccaaggagctagaagatgcactctaagactgattaaaaatagcagctcgatcgggtggcttaatgtcattctggttgagggactggaatatgtggtgccactatattgggataaagcaggaaagtgagatgtcaagacaggacttcagtagatctaaaagaggtaagtcatatataagcatattatttggaaatatggggtttctctttcagtgtcctgataagagactggattcagcccagatggttcaaatgcatactttagtgaatggactacttatggtattatgggctggtttacattcttggggttgagggacagaggaagaaataataaatactaattttaaaaactgtacacaggcttattgagcactgaggcagtggaagagtggccactcaagggtgcagtggtcagggatgtaaggagcccctgctggaagcacagggaataaatgctcccacttctgcccaaacacagagaaaggcagagagtgagtgggggttaggtaaagcagggaggggtaagagaagaataaccagcagggaaggtaggtagaacttgggttggggtgatcgtgttgcctgataaactgttctgtacagtttgataatctcttgcagggagatggaatattttaatgtaaatatttgcatttagcacctactatttcatctaatgtgacaggagcttggtggaccagtagtgacttgagcaagatctctgccgtcaagtagcttatagtctgattggaaagacaagatgctaccaaaactagcaaaaaacaaacaaaaaaatgattacacattgtgattaatgctataagtttaatttcagagcacacaaaaaggttaatcctgcttgtataaacttaattctttaataatgatactgcaggcatttttacaatatagttaattatttgggagtgggaacaattcttttgagtagcccattttgctctatttaactataaatacactacatgctacaaatcagatgtacagatgaaacagctgctgcttcgttgttttgttcctgttactcattttaatgaataatttgaacagactccaaaacattaaattatatgtataaacatactttaaggattatatcataatgttagtgtatttaaaacttagtggtgatgtcattacctaaatatagtaaattttaagaaaacaaattatttgagctattttaccctctataaatactttggcagtaaaacagacaagggctaaaaatcaacccaagcatccatatccaagtatagagagctgtgaaattcccccactttcttcctcctgacatatgaaccttgataattaaaatatatctttccaaggtccctgcatgaaatttgacttttcttgcctttctaatggagatatgagcaatggcagagacagggaaaaggacttagaagcagaagagttttattctgtcttccttgatacttcctgtggctgaagggttttgtccaaagggaaaagataaatgaacagaggaagatagatgtaggctcattcctcatgcctcccatcttccgtagcattcacagcagtctgagaacagacaaattcaagtcctgggttcctatatcctgagcatttgcttattaaaataaacctttgaatacttcatctactctgattcagactactctctttcctccatgaaaaagctggtgagggtgttataagctgatactatatacatgtaagatgtagtcatgaatcattggaagctcactgcttttagaacctgccaaaattaccatactaatgcacttctatgaagggtgttaaaatggtaattaagcaaataaactctgcttattttagtacctttattcatttcagaatattttttgtatggatctctcatttgatttttacacagtttttagaagcagaatttctgctgttgcagggggaagttttatatgttcaagtacttaaatatgagagaaaatctagaattgcctctacaaatcattttgtttgtaataatcatgagttacacattctgtttgctctagaaatcaagaaacagaatagtggatcatttaaggccagaaactatatccactacttgtatctcccttttgggatggttttctgatgtttttttcagtgtgtgtcatttgtataaccctggccggctgtcttgaaaatatatgtcactaatcatggtagggggtaggtgggtgagggggtcatctgattggttgtttacataaattagttgtagtgtctgttatcttcatatttaaataactgtatatgttagtataaaactccagtataaaatgggcagctggccaggtgctatggctcacatctgtaatcccagcactttgggaagctgaggcaggaggatcgtttgagctcaggagttcgagaccaacctaggcaacatgaggaaacctcatctttacaagaaaaaaaaagtaagtaagtaaaatgggcagttggtttagaagagagacagacaaaacccataccctttctagatagaaagatccccatctagatgagtgtgctttctgataggagtcacacagccatacctgccatcactgaaccattgtgtcttttactttacctgttctttgattttgaaatactgtggaaatgatttctcagattttcagagttgtctttatggaaatgattttgttttagttattcacgtctaggacatctgaaaaccaaaagtaaagtggccagaccatgtcagtctagaaactagcagccagtaaattgtcttcttaaatattaagaaagcaatatactacctagatgcaatcaaagatgtcagcttttccttaaaaggcaatgatcaaaagtccaaaggtgcacaaggaaatagttaaacctacctaagttgaaacaaaagttttggctttaggacaaaagggtttaataggaattcacaagtaacctttctatttttgagtgactgatttgcagttcaaactacaggtaacctctttgtgctttgtgttttatattgttgttgtgtttttgtttgttttcccacgtgttggcagtgcttgccttttttgaaattttccctgctcataaacactccactagggggcagacaaaagaatagagaagaaaagaaacccatatcaatacactgcatccagtatacatttacatgacatgtttgctgctccttctctatactgtggcggaagtctttctgttcattcatccttcttataagggcactcaaagtgatttttagcagtcttatttttacatttaaaatataaacatatttccacaagttaaatggtaattttaaaattcattgtcatagtaattttttatggtttttctggtatgtctaccagtgaaccacttaataacgaacacttagttgtgtattgatgactgtaatgatgatccctatagggtttatcttacgtggagcatttgtttacccatccacactaaattgagtcttgctcttttttttttttttttcgagatagggtctcacctgtcacccaggctggagtgcagtggcgcaatcttggctcactgcaacctccgtctcctgggtgttcaagtgattctcatgcctcagtctccccagtaacttggattacgggtgtgcaccaccatgcctggctcattgttttgtatttttagtagagacagggtttcaccatgttggccagactggtcttgatctcctgatctcaaatgatccatccttcatggcctcccaaagtgctgggactacaggcgtgagccactgtgcctggcctgagtctctactttttgtcaggcacatgtccaagttttgagaacagagcagcaaagagaaagagcctggatggtagagtgtgaaaaggggggtggttatggctgcctcctaagccatttggtgaaaagactaggctgtgaaaggaaacggaagaaattcttgatggctaatgctgggtggtttttatttctaattattccttataacagctcataatgattagaatgccatatggagctggagttggggcttcacttgtgagagaataagctccccttcttaatctatgccatgtctagggaggctagctgaagactttttattttttatttttaattcttcctttatctttgctccagcaagaatcaaatccagttaccaaaaatgtatttacttcagccaacctggggttacagaatctttaaatgaaaatgttattgcttggctgggcgcgatggctcacgtctgtaatcccagcactttgggaggctgaggcaggcagatcacctgaggtcgggagttcaagagcagcctggccaacataacgaaaccccatctctactaaaaatacagaaaattagctgggtgtggtggcatgcacctgtaatcccagctacttagaaggttgagacaggagaatcacttgaacctgggaggcagaggttgcagtgagctgagatcacaccactgtactccagcctggacaacagagcaagactccatcacaaaaaaaaaaaaaaaagtcattgctttgcctctttgtggtcagttattcaacaaaatacagaacggtgtttttgtttttatttcttttttatatcataaaatttattttaactacggatgttttgttttctcaactttctctctagtttggaacagttatctttgtagataactataagtagattgtctagtaaagttttaaagtataaacacttgaattgcctaggagttaagctaattttttttctgagactgtcttcaggttacaatgcttaacataaattgaaatatcaagagatctttttttggaataaattattcatctgttagatctaataaatcattctgcacactgtgagattgcaattgttggtaaacaaggtgataacatttctgttgagaggattatacagatttgttttagtcattatttgcttagagcatcaactgcattctgtaccagattgggcaaggcctaacagaacattcattgagtgataattaaatatcttaaatgctacaatgttttggggatgctgtgttaagttagaaagtaaataaatatctagtgtttttataatcatgaaatgcattttctttatgggtttcaggaagcatttcagttaggacttcacctttccctccgtaattctagcatggtaagcaagacttggaaaaagtcacaataggtggaaaattaaggaattaaaaatttaaacctgcctcagaaggttgtatggctcctgaaaccaaagatacattcatccttattttaaaaactagctacttaaaagtatgtatgatatgaataaagattagatgagaatatggagaaatagattttttgatgctggcgagattatgtataattttcgccttcacttttcagttgacgttgttgctagttatttattaaaaataaatttgttaaagtaaatgcccatatagcttacatgatttttttctggagaacactttccttggatattgggcaaccttcagaaataatagactccaccacagtactttaagaggcacagacatttaaaatttatgatatacaagtataagctaagtttatgtttgcagggtttttttttctctttaacagctgctagaattttaagatttcttagaattaaagacgagataaaatttaaaccaatgctatccaaaaattaatatctaagaataacttcgcataaattatagagaccaaataggcttttgtctacactaataaaatgttcctttgaatccttaataatcttagtataactgccctaggcgatccaggttgattgaagcattatggattttagttggaaaattttccctgtgtttgatttagaattatctagctttttcaggaacagaacaataaatagaattgttgtctttaacatgcctacccttctgtaccagctgggatatgaggacttttatctgtgttcatagcatatatatctgtgttccacttgacttctggtctccttttctctatttcaccagcatgtacagtcttaggaatgaggaatggggaagagatcactggattagagaggggatgtgttgagtggaaaaatacaggccaaataacttccttcagaatttcgtgaaggtcaggtcccatcacaaagggttggagatttgtggtattttgaagccctctaattaaataggggaataggtaccatcttttcctttcctgttcacctttccctgttctacccttcttcgttctagttaaataccagcaattggatatgtaaagtaaaatactgaaatgtgaaattctgtggtgaaatgtgggatgtccagatgacatctctgaaaacccaaagccaatccctgtgctccaaactgaaggtttatatttagaagacagtgcagatcctgtatttttaaattgctgtaaacatgtttatgtggttatttttagcttttacagactttagtgaacttccaagttggcaagtcagacacagtcggttgttgtctgttacctcagatgccagcactttctgaatgactctggttgtctcactgggtttctaacatgttgaaagcagatgagtgtgtaagttatcttgtgtcaactgcacatggtctatctaatctatctatatgggtgattgtattactatacatagtgtacttgttttcttttttcttttttttttgtttttaagcttttatgaactggtaacaattttgcttggagctcaagatgagttgggtcctgccagatggcactgttatttctctggcagaagtagctagttattttctcttttccttcaacacttctctccttgtcctcaagcattaaatcatgcatatacaatacaaatccttacagccgctgttattttcagtccattgtatctatttcctgttgaccgaaggttatgaggcttgggtagtgtagagggagatgaaaagttgacagaaaaaagaaagctgggctcattttaggggcaaaacaccataaaatgggcaagatggcacttggatttattgaaaacaaaaagaaataaataggcaatcgtctttcttgtatggtgagatcattatctgcatggtgcatgcatgaagaatcgttttcctccaagaatcgtgttttatgaaagggtgacacccgtagccctcatggggaaagaggaagatgtcattattggcacttgggctgagccttccacgtttgcatcagagatcttgatttcattatctgtgccataatttttatcttgcattcaaccttgtacttagtccttctctttagatgaagttattcattcttgcttattggacttaatgtagtttatagtcagtagctccagaaggcataatttatctctttggaaggatgtctttctaaagaaacttttcattgccatatatcttgttctggaagctttagactgagatttatgttaagaagaaaatgatatttaagcgttattttggctttttacatataaatctaattatggaaatttgaaatttgatttgtaacacttcagtgctttccctttagttcttaatgtgaaagtgttgtttttaaacagtgatccaaatcttaatatagcagtgttttattttgttgtaaattgtgaatgtttcataagaaactaagaaaagaaaatgggaatgttttgttttgctggaaattcaaaacagtagttctaacccagaaataattattttggattggatagctgaacaagaaatggaatttagaatcagtacattttttgaagataaattttcattgaaaaattctagattgtcattggcgtattttattaatgatcagttttatttaagcaaccatttcctttcctaatcatgacaataacaacatatgggacacatttttagggtagagtaagtttgtggaacacagtgaaactaggaaatagacccacatgcttgttaggatctcaggcacaactgcttacagtagcattacacaatttaaatatttgttgtggattttattattaaagctgtacctgcttcagcaattgatcttgcttgtctcttaagttgaagaaatatcctttaaaactgcactgtccagcctgggcaacccactgagacctcatctcttccaaaaaattgaaaagttagccaggcgtggtggcatgcacgtgtggtcccagctactggacaggctgaggtgggaggattgcttgagcccaggaggttgatgctgccatgagccatgactgctccattgcacacagcctgagcaacagagcgagacactgttgcaaaactgaaaacaaaacaactgcattgtccatatgatagcttctagccacatgtggctaaatttaaattaaataagttagaaaatcagttcctcagttgcatcagccacttttcaagttttgtagtcacatgttggctaatggatcctgtgatggtcagcacagccatttccattatcacagaaagttctgttggacagcactgctccaaaactgcaattagaatttgcctctgtgcaggaaaattttatgtctttaatttgagagataacatgaattttctactgcataaacaatatttattttttcatggtcttgttctttatttaaacaagacgttattaaacatcaaatggacattgacattatacttcatagcatatgccattttgttcttattctctgtgatgacgttacattctaccctctgagagactgggaagtcattacacacacacatacacacaaatgtatggatatatatagagagagagagactatgtaactatgtatatatacataaaaatgctaacataatattcaatgactgaaatgtgtgggccttctcatagtaggcactgtgaagttgtaggttcctaatattaacatattggcacggtttcagtcccagggttcataattgacttattccctgattaagttagtttcactttttgttcactgagccttgtgggctggagatttgagagtttatggctgaattcttacaacaataagaaaacccactattggtttgttgtatcatccattatacctgaaggccaagttagtgaagaacagagacagcatcattaccaaatgaattaagacattcattcatttgttcatttattcaggcaacagttatcacccatgccttttaaccaccaagtccttgcatgctgtacactatgctgaacacttaaagagaaataagacagaatcttgggggaggaaagcagttgtacaaagggttgattgaaatgccaaggtagagtgctatgatggaggtttgcacaaggtactgtggacatcttggagtagtcagcttgacctggccgaggtgacaggggagccagaatttgcagaaagaaaggtgttgccaatattccttcacaccaaattccatctactccaaatggaaaagatgagtttcttgccatgatctctcagtattttgggaattttgcaaaccatggggagaaaaaaaactctttaaaaaaaaaagccattcctaagcatcactttgatggctgtgtaagactcctgtatggtggtatatcatcgtttatttactcagtttcctactgtgactaatcatctgggtttgcccaggactgagccattttctaggatgtgggacttgcagagctaaaacgaggatagtcttgtgaaaactgggatagttgatcatcctaccttctactgaatatttagatcatttcaaatatttacttacagaaacaatactgtgctgaaaattttggtgcctaggtatttagccacattttttttttcattatttccttaggtgagagtcgtagaaatggaattaatggctcaatgactgtggacatgttttggagctcatggcagtgctcatggttctttattgcattttttgctgtattcagctagactggcaggagtctgcctggacatttgcaccacctctgcctccgcaagttcttagggagatgagccaaagacttgttcttcactagctgcaacttgtgttccaaatctttagctggccagattgcatgtaaactccaactaacagagccttggccagaagtaggccaaaagccagtctcaaaagatggagtgaactctgtgtcccgattttcctctgcccacatcctgacctgagctcactgactctgactgcacatggtggtaagaaaagggtgagatccagtggacccaaggccagtggcctttcttcccagtacacacagctgtgggtcaccccagggcaccatccgactcacatggaacattgcatgtttaactttgtttggctcccagccagtttctcactttttccgtctcctcttggttagggtaagaaagtttgcaaaaccaccagagttagagtgtgggcacagccccaacaattgggaatatgaggacagaagtgaaatggtactttcaagtaaaaatatacttagcttgccccacagtgctgtatttagaattaatacagccatgaggtgacatactttcctgtggaacctaataaataaatttacctaattggggtccaaggcagaccagcctcataccaaattgtctctgtagtaagatgtattaaagtcaagtcctattttcagggttcttaacgtgttaacaggggtcctgtgaaaccttgaaactatacaatattacctatataccttttttctaagaaaagttttcattgctttaatcagatgctcaaagccgtctatgacccagaaaaggtttaagaaccacctatgtatattaaatactaaggggtttttgtcattgctttttttttttggctttttgtttattttatgtagtgcttatgcctaggctttgaggtaggcattaatttagcagtaatttcaacaagtaaattatatgcactattactgagaattcaaaattcctgaactctttccctagctagtatagtatttctgagtcaaatttgatttttttcctcttatgaaattgttttatttccaactaatttgttgtatccaggcaatgtacgtaaactctaatatcttaagtttatggaacagttgaaagcttagatctaggcattgttctgcattattttcagtgtattcttttgtttatattactaagctaaagttagctcggatagcacaaggctagaaaatggtgacaacagtttgaaaacaggaaattttaggcttctgtgtgtttggaacagatgatcataatgatagagccagtggagtggaaacttccaccgagcctgttttttccttattttgctctatgagaaaagatggtgcttcctggaaaacaactcaagtattttaaagcaaatggttttcctttgtccctgcttcatggttaatttgtttttctttattttatttaccctagtaatagtattatggaaatatttttaataggcaaagtaattcctaaagtgcttattttagatttttaaatatttcaatgtattaccatttactgcatggtttttagagaaaattaaagcaatatattataatgactttaaggaaagaaaaataaatttattcctctattttaagtgttcccaacttttcttgtttgtttgtttaaccccctaagtgccagtctttaaaataaagtcgtgactctttatctgtctaggctgtttcctggctgagactccttccacatgtatcccggaattctatatttaaaagaaaggttaaatatccattcactaattgcagagtaataataaaatagcatttccatatacacataaactttttgttttgtgcacatcattcctaggttattttaaacatacaattttttaaaattataaaagcaataaatggaaacattttgaaaaaacaaagtatgtaaaatatgagactcatctggccctttcatctgacctattcttagttatcagagttaacaacttagtatgtgtccttccagacctgttctctaaacatagtgtgtgtttgtataaacacacagtttgtgctgtgtttgtacaaacacacagttatttcacacaaatggaagtatataccatgtgtacaattccgcaccttgttttttttacttaacagttatcttgtgggcattgctcatgtatatatatccatgtcactttttgaatgaattgcctagctttattgtgtagatgtcccataatttatttgaccattatcctgctgataaaatttagattacaacctatcttatcaaaaatagcattttcattttgtgaaacgcacatcttcaaccccgacattttacagatttctgagagtatattgaaattttgaattctactaaagaagtcacaataatggtctttccttaaatatcagttgtgaaataccttttaagagatttcaaaataaaaaattccgctctacttttttccccacactttctcaggaaaagagcgggttagtaaaattacagtggtggagcttcctggtagaagggaagttggctcaggaatgtagaaagtattgctcttcagctatctggacaaggtatactttgttagggcttaacaactaccaagagaccccaagatgcagtcagcagagttctttttcaagtgcttaagggaatgggcttgttaatggactacttgcgtgatgttgctgagagctcaaaggaacaggagctgatgccttatctcaggggaagttgaggaaagctttaaagaacaggtcttgagctaggtcttgaaggatgagtaggagctcatggtgagggaaataaggtatttcagactgaaaaagaaacaaggaccatgtgggtgctgtctgaggccatctgtggaggtgagagattggagagatgagacaggtaagtatggttttgaagaaccttgtatgctatcttactgaaggagtttggacttcaataacaactttgaactttccccccccccgctctgaaatcttttcatttagtctcagtggctgtctgtgatgattattctgatggacaacatctcaccaaggctttgagcacttacaatgcatgaagtgctgttgcagatagaaaaaaaaaaaggaattagctttcaaggagcttaatgtccagttgggaaaataattcataagtatttggagagtttggaaatgtaaaataatagactgttccaatctattctacagcaatgcaagagatattacagagcagtaattgattgtcagtggtaggaaggtagggtgtggggaggaaaggggaaggttgggaaaaaagaaccttgaagaatgaattgggtttgaaagatatttgctagtggtaaatattgtgaacaaaaataggaagatagagacagcattggcatgagcagaagatattaatataagaagatgaagaatgagacgtaagcttgaaaggacctgtgtttgttttgttttgttttgtttttgaaattttactttaaagagcaatataatcctattgattggatctatggttcttaatcatggtggcacattagaatcatctgttgagtgtttaaacctgcctattccaatcttcaccccacccccatacactacaatttagttggcttaaggtgaaaccccaagctttttttttttttaagcaaagctctccggatatttctaatgtgcattcagggcagagaacccatggactacccccgacctcttctctgatcttctctcttgcctgcccatatattggccacttcctcaataattagctcttccagtaaaggtacagggaaaagatgagggaattttggcaagcatcacaccaggcatgtgagctgtcatttataccacagagaactcacaaaacagggtgtacagcagttacaatgtttttctttaaagctgaagccatttgctagttaggttaattaggcaaaatttgtgaatttgttagtaacgttacagccatataggcaaaatttgtgaatttgttagtaatattacagccattaatggcttggggttaatccaggttaaaaaatgtttccttcccaccaaatagtgggactcccatctgtactttcttgccagtatgtacatacccatactctagggtgtgtgataagcctgccttaagacctagcttcagtgtgacagttctacaggtgagcatatccaatttgctaaatacaggaaatgtttaaaagaatagttcttttaaaatgatgtttaaaaacatctctcttatgtctgtagagttttaaaaacaaattaatttgtttacacacctctatgcttgcctgaccaattcttgaatgggctgggcagatcgcagttatatcactatccctgcaatgcataaatagtatgagaacttctgtatttttaatccttgcctcaaacattttgtattgcgtatttagcagacattgactgagcacctccttggcgctaggcaatgggaaaggaaagaagaaaggttaaaatggctccagccctcagtacattcaaatgcacagatgtcaaatgatttaggaaaaaggtggaaatggagagctcagagccaactcggatggtgccccgaagagggctgagctaaatctagggggtagattttgtgccaaggggtgagaggcaggacagagcagagtgtttgggaaactacaagtatttccaatgtggttggaaggcagaggggcaagaagtgacgctggagagatttaggggtggagatggggcgggagttgattggagggtcctgtgtaccctgccagagtttgggttttatcctgtaggcacagggggcagtcactgagcatagggaattggcttcagaatttggtacttttaagttaccccaaaatccagacttaactgttgacttcttgttaacaaattatttgttcaactcaaaattggagtgactattgcatataagaaatggctacaaaataagtttttacatagtccttctcaactatgcagacatcttgcaaatttcagcttcttcattacctgctcgtaatggaagtctagtcgttaaaatgattttttgtgtgaatttcttttaaaattactttgagtatttggttttgaaggtttctagaaagcctgtcctttttgtctgctcctgctctgcaggattggcaaggcagtgtacggctttctctggagctaccaaggcagcaaggataaaaataggacaaactttaagaatctcagatattttcagataacaaagactgatttatgtgggcccgttttgtgctctgacaaaacatagagacgcttttgtgctgtgattagcaagggtgctgatgtcagttctcttgtcgagcatcaagctttattctgtggctaaattgtgctttgtaccataatccagagaacctttgtatctgccttattaaagtgtgtagtttatgtaattgcttttgttttccagcttaatctgtgccagattcaatgagggtgactcattttgtgactgagacaaacattcacatttggaccatgttaaaaataaataaataaatggcaggtgctgcttggctaaattctgtgttttaatgctgtaatttcctgccgtaagggttcacgtcttgtataatgtctactcagcctctgtaatcactagcccaatatatctaatgcacctcaattcattgctactcatttcttgattatttattttagttcctaagggctttttgaattgtaacaatgtgatttcaacagggaagccaaggaatggatgggggggagccacagttagccggaaaacaaagagtgacacataagctgtagcaaaaggacatgttctgtgcttttctgtttttgccattttcccaagatgttttgtgcatgtgttttggtaaagttgtcttagttatgtttattttattatgtatatgttcagtattggagctctttttctcaagtggaagatgctttgaaagcactctcttcattgtggcccatgtatcaaatctaatctcaaaaattttacaagtctactctctcaggagaattctgtttatttattgtacagatatgctatgtactaggcactgtgctatggcaaataaagcaggcgtggtcactatcttcttgaacttttcagtctgtttggggagttacgtactacacaaataaatacaaagaaaaattgaattgcaaaattacacaaatcactacgtaggtaagtaataggatctctaaaactatgctattagtttacactggagttggttgcattgagggtggtcagggaagagaagccctgaaggttggagttggccaggcaaaaagtgagggaaagaatataatgtatttaggggaaaacatgtgcaaagtccctgaggcaggtaagagtttagcctcctataaaccctattattggagggggaaaagtgacagttgatggaaattgagagaaaaaagacaggaaactgtatttaaaagatgaactatacaagcatagcaatatggtactatttattaatagtataggggcaaatgacactctatacagtgcaacagcctctgagagtctcctgaagtgcagtatagaaatggatgcttacaatacttagtctgaatcattggggaatggattatgtttggtgaagtatgtagtaaagcattttagaaagatttgcgtgcaagacaataaagttttaaaaagtcatttctgtatttaaagatgaagcttcactatctggagaaatcacttactgaatgatatgatttcttgagggccctgcataaataacatcatattttatattcttttgctttacttctgcattactttttaaagcttactgcttgagagggaagtatccatagagggataattttactaagagatgatatttatttattttgcagtaagtagatgcatattcaatgaatggatttttatagtccagaaaacagtgctaaaatcatgtgaatccaacactttatgacttttcaatattatctaaaacatctataggactctaccctgccttccctggacacaaattatatacttattcctttgagctgcgtgaagaatgagaagttaatttaaaatgttgatgattaaagacctatataatgtttttaggcctttgtgatctctggtcatcctcttgttaaaggattgcctaaatttttctgtagaggaatgcttgttcatgtagcaatacctctgcagacattttgcctgggttgctgtagtctcaagtattttcatgtatgttaaatatttttttccacaattagtcaattctttgaaggtaggaataatgaattatatacttgtttttcttcccacaagtagcaaagggaatgttttattccactgggggttttcgagtccttccacttcccagagcatccccaccaccccgctgccctttttttttttttttttttttttgaggaggagtcttcttctgtccaggctggagcgcagtgatctcagctcactgcaactgccaactccgggttcaagcgattctcctgcctcagcctcctaagtagctgggattacaggaacctgccaccacacccagctaatttttgtattttttagtagagacggggtttcaccatgttggccaggctggtctcgaactcctgacctcaggtgatctgcccacctcggcctcccaatgtgctgggattacaggcatgagccactgcacccaggcccagagtgtcctcttgaggtagtcttacctagaatgttgaatctggagcagagaatgtttcttagtaaatgactgagacttgctaaaataggcctcttttctgtctagctgcctccctgaggaagaatttcaaagaggagtaaggtgtaagtttgtttccaggcacacatgttggggttaaaggctgataaggaaggctgtttgtcatttggttctgcttttattatttggtgaccatagatttagggagggtgatagtaaaataattttttaggcttctctaggtatagtattaaactcaaaatttaccagaacttgtggagggggtatgtggtgagtgtattacagattgcccatgtatgtttgttgggaagaggaggggaaatattagaaagagttaaatcccatactcaagaatacaggtcttactcgtatagtctttgaacaacaggctgtgtggctaaaagagagacacaatcaattgcttcccagtcaagaagccagaaaagcttcaaaacctttccccctccctactccttgccaccgcacctaaaaaaaagagaaatcttttaagtgtttaaaatctgtaggagtcttatgaagaagcagctttatgtgtattctttatggcataatattaatgcatgaaaatctgttgcttttttaaaaattgtggcaaaatatacataacataaaatttatcattttagctatttttaatatacaattcactagcattaagtattaatacattcacagcaccattgcaaccatggccaccatcatctccagaacttgatcttcttcaactcaaactctaggcccattaaatactgtaataactctccatttcccacccctccccctccgcagggcctgacaaataccattctgctttctgtctgtatgaatttgactacttgaactacctcatataagtggaatcatacaatatttgtctttttatgactggcttatttcacttagcataatgtccagcttcattcttttgcgtatggatttctagttttcctaacaccatttgttgaaaccatgactttttcatatttagtaaaaactgaatcctccttgatgtattgcctcaatattatatagtaggagatttaatcgaacatactgaatatatatatacattattaagttaattgagttatgagtaaacgttgcttttcagagtggcagattatcctgtggtaaaaacacacacacaaacacacacatattgtgactttctctaaacaatgcatttgtaaaatcagtttgataaatgtgcatcttcttgaaaacattatctcaagttaatactgaatggatatttttgttttgtttctaggcatggaagaggagatggttcgtgttacgcagtggccgtttaactggagatccagatgttttggaatattacaaaaatgatcatgccaagaagcctattcgtattattgatttaaatttatgtcaacaagtagatgctggattgacatttaacaaaaaagagtttgaaaacagctacatttttgatatcaacactattgaccggattttctacttggtagcagacagcgaggaggagatgaataagtgggttcgttgtatttgtgacatctgtgggtttaatccaacagaagaaggtaagttcaagatattactattcaacttgaattcttcttttctgctacatttccagaaatgtcatacaattctttgttattttagttacacaatataatgttttatttttataataggaacttgacatttggaaaaagcactgaatcctttaattagtttggggagaagctgtttaccagttttagagcgacagacttagacatattggggcagtttttaaatatcctgaagtaaaaggtgacaagaagacattttaagaacatttattgaattccaatataaatattcagtttaaccatataacactgttgatattttactatttttcacctattaaaaaatagcacatttggccgggcgcggtggctcatgcctgcaatcccagcactctgggaggccgaggcgggtggatcacgaggtcaggagatcaagaccatcctggctaacacagtgaaaccctgtctctactaaaaatacaaaaaaaaattagccgggcttggtggcaggcacctgtggtcccagctactccagaggctgaggcaggagaatggtgtgaacccgagaggtggagcttacagtgagccgagatcgcgccactgcactccagccttggcgacagagcgagactccgtctcaaaaaaaaagcacttttatgtagctcaacccaattctttaggtgctatttaaaaatatattttaaaactatattagattatggccgggcacagtggctcacacctataatccctgcactttgggagactgaggcagatgggtcacttgaggtaaggagttcttcaagaccagcctggccaacatggtgaaattccatctctactaaaaatacaaaaattatccaggcatggtggcacacgcctgtagttccagctacccaggaggctgaggcaggagaatcgcttgaacccaggaggcggaggctacagtgagccacaattgcaccattccactccagcctgggcgacagagcaagatgccgtctcaaaaaactatattagattatcccatttatgcctagtgttccattattggaacgctaagcatgtgggagttatttatatcccactgctcaaggtcatcgccaaggtctgattgcaaacattcaaaaaattgcaacctcaagcataaataggttatgaagttaggaaatagccaaggtaattatcattacctatgaaatgcaagtgagaatcagtcacaaaacacaatgaacaagtaccaaacaaatgaattacttagcacaggtcctacaaggaacatggaagaagaaagaggggctcaaggtttgggtaagaggtagtgaaggaaagcttctgaaaggaaaataaattgcaaaatgtaggcttttgaaagaaacagtatttctgtgtaaatgaaaggagggacgcagaaccctccaggcttagggacttaggaaagaacagacccagagaaggaatcgaattttacttgactggggcagtaaggctctgagtgaaaaaggcccagggacagttgcttacaaatcttgaatgagggactgagatttggggtgcctatcctggaaagagctgagtgactagagggctcaagaattttacaagtggaattctacctcgggtacttttttattattattattattttcttttttttgagataggatctcactttgtcgtctaggctggagtacagtggcatgatctctgctcactgcaacctctgcctcccaggttcaagcgattctcgtgcctcagccttctgagtagctggaattacaggtgtgcaccaccacactgggctaatttttaatatttttaatagagatggggtttcaccacgttggccaggctggtctcaactcctggcgtcaagtgatccgcctgcctcagtctcccaaagtgctgggattacaggcatgagccaccacacctgacctcgggcactttttaatagctggctgaccacttcttctctctgctcttcctttttaaacaaacgctcaacatgtaggtaggggactccagtacaaagtagttttgtagagccaagaatcagaaataaaggtgaactgtggtctttgaccttcttgtctttgtggttatactcacatttagaagcgtgcatttccgaacatctacatttaggagtgctgtagataccataaggagtggaaaattgtgttaataatcaacaccaagattcggattgaagtggagctaatcatctctaatgagctcaggccagcgtgccgcttcctctctggccagtcagcagccctggggaaaggagcctgccagggctggggtttgcccagtggggtcggggaaaccccttaatgagggcgttcagaatctcacgggaacagcagtctaagagggaaggaagggtccagcttagctgggagggggctgatgaaatagagatcttcagcagagctctagtgattaaaaacctcaagaaattgtttcacaggaggaattaagggttcagttgttttcgtgaagttactaaacgtggtcacagtgtaagtgggcatgggggtgctacttctaacttcagttaaaaccctttcctgtttgcatttatagtttatatttgagtgcagcagagggtttcagagttaaaattacaaatgaggtagctctttttaatggttaacatctagtcagttgatgtcaatgacatcaatgataattattggatttagacagcacattagttttattatgtgatggattttcagttaaaataatttgtcattttattatcttcttcttgttcctttgcctattgccttttcaatgtagaatttgtttggggggacataagggcagacttttgtctctgttggttgtctgtatagattgagctgatccaaaaagctaaatcatagatgttcttccacctctcttacttttttttacaatgctcctaaatatatttacaaaggaaatgagatgttctcatagaggatgtgcattcttcagtcaaggaatatgagtctaattttttgaagcctattcaagggtgggtagggttgagaacccaaaataagaatttttaattctcaagtgtctgagattaactttgcaagttttaaggcacagcgtcttgtctatttggccaccttaggatgattcttatcatttgggagcctgacaaacacccactccgctctgggaaggaaagcttggtatgcttttagaaaattgattgattagttcaccaaattatttgagtttgctgacactctactaggctgtgggaattcattcagcaaatatatattaggtgattagttaaggagacaaaaggtaaacatcacagactgagcatctaatgggagaggagtcattaagagaaatatccaaaataattcattgtaataattgatgagtgcaagtttatatatacatatgtatatataaattatgcattaaaatatatatacagtgcatatatatatgtgtaaaagtataattctatggaagtttatgaatatagttcttgtgctcatagagcttacagtcagtctagtaggagggacaaataatccaggaattatactactgattcataagcgctctgctaaagaagaactagataagcatagttagcagcagcagtgatctttccagtgcagaactcccaattccttacaaaatagatgagaggtatatttaggttgagtgtaactcttgacttgtgaacttttcatctttacaatatccatggttgggaaagggttgtaagaaaattcacagtatgattaatcagatttcttatatatagtctgtgagttggctaccaagtacagctgtgttaatcacaagtcatttttatgtgttcattaatagataaaacaagtatctaaggactttaatctgccaatacgttctacattgaggtcatgagctatatctaaatgcaactgcatttattttttaaattctatgattgagatttttcacaacttcatcctggttatttccccaaatagccacatttagaagtgtcttaatatactgtgttgaagtatttgttgagtttcttggaataaatctgtaaagcatgaacagttcttcattatgtagtattaagcagccaaaatcatactttattctgtaattttggtttttgatccataatggcgaaactgcaaaaagactctcaaagtttttcagccatttaagttctaaatagcagaatactgctattatcctttgtaatcatattcatacagtttaatatgacaaggtaaacatcaaaatgcctttgttcttccactgacttgactacctgttttatattctcttgtgtccaaatagatgtcaccaccaatcactaaataatagttgtttttgtttttatctagatctgtcccaagccttctgctcttcctgtttgagagagctgactgtcctactgttggcttgaaaattagctaacagcacaagataatttttttactatgctaatttcagactagatgtgagaagaaatagaccatttctatagactggttatcacagtctaagaaaataactgtccccagtccctgtgagaataactaattttcccctgaaaacaaaaggaaaagggaaaaatctgacctgtgttttgattccaggaacctctcaaaatatcgttaccatgttatttccgctgccccaggtgaccactgctattattgaatactgaaagtgctggcaggctatatctgtttttaagtcctagctcattaaactgtgtgtggttcctatgaatgcttttctttagtagatttgagggtagaaactaattttgtttttcttggaaatgtacagatttatttttgtttctgcaacacaaggtggaagctgttagatctgctaaacaagtattgggaagcagctcactaacttcatataaaggtctctaatctaattagatgcaggattagaaagttgcctctgagttgcttttctcaaaatgcccagatcatagtggcttaataaaaaaaagtacaattctctgtttgatattctccccttgagtcaagtagatataaactaacatgtaagaatatacatacacttcctttcctgtaaagcaatctttctcaattagggactttttaaaatttctttttatttacttttttattgaggtataacttactactgtgaagggcacagatcttaagtatacagttcaatgtagttttatgtattgatctatatctacatgtagatacagatgtctgtgtaactgcccctcagattaagaatggtactcttcccctcccctagaaagttttctcatgcctctttccaataaagcctccacccaaattaacttttttaaaaattgcttttattactgtggattagtttggcctattcttgaacttaggaaccattgaaaccattattttttccagtattaagcctgtgagattcatccatgttgtagcatgtaacaagagttcttcattccttgtagcatttcattgtgtgaatatatcacaaattgtggatctattctagtgttgattgatgtttgggttgttttcaatttttagttaacacaaagctgtagtgaacatttctttatatgtcttttgatgaacataaacacttagttcttttgtgtatacacccatgagtataataactgtgttacagtacagacgtatatttagctttaataggtttaacagctttagttttccaaagttagtgtaccagttgcctacctaccagcagcgtgtgagagtttactttacattctcatcaatgtttgatgttgtcagtctttaattttagctattctattgggtgttagtggtatcttgtggtgttaatttgcattttcctgagaaccaattcaaccagagagtttttagtttttttttctttttctttttttcttttcttttcttttctttttttttttttttgcatatttccaagccactgctcctgagatcttgatttattgagtctcctgcggtggggccctgtcacctagatttctaaaattccccacaagtgattcttaggccttcaaacctctggataagaattatggcatttgtcagcattgcctaaaggtttaatttaaagtctccaagaatatttcacaatctactaaagagggagtcatgacaaataaaaagtttttctacttgaaacagattaaacagatcatgctatgtttaagggtcttcagtagttgagtgaataaattgaagaaactgcaatgcaggctgcttcacagaaaattgcaactactgctatgtcttatttgtatccacttgttagatttgcctttttgaaatgttcttccataaaaaacggtgtatttagagtaagaaaatggtatgttagtattaatgataatgcatactctttgtagacccttatttgctaagttagacagttctattcaaaatgcttctctttacagaaagaaaaattattaagcacaccagataaatcattaatcaatagaagcagagtaaccctgacctgtttacatttaattgtgaacataaaggtaaacttttacactagaaaccaaaaaaattattctatcagtagatatagcccatcttcagagaaaataaatgtatttggtctcctgaaaagaacatggggatcaccacagttttattattatatgctcagatacagtaatttagtggttacaaactcaaagagcctatcacatcaagtttgaaacgttctaccttaccaataagaaagagtagaattgtttcctagggcttcaactcttctaccatttggggtttctttaagtaattattttgaatgtttagaggcattgtcttggcaccccaacttttgtgagggatactaacacaagggtattatggtttcaaataggataaactgtgcattaggctaggggtcatgtgggccagtttattatttgtggatttcatcacatgataatctactcttcactggaagcttgttcactgaaaggctttccctagcagtacttaatagcttcctaagtaaatttcaattaggagtttgctccagcagcttattagcctttaatggatgttaattatactcttcatgccttctgatttaagaaatgggaaataattttacacacataagcaaaccctaaactaatgtttagttcttagaagcttgataccagcattacttagaaagagcagtaagtcagaaactcaaggcagaaagcaaaatggtctattctattactggtacagtagtatagaatagaggcaaatcacaagtctttataaagtagaacagaagtttattttttcagaccagttgcttagctttggtcagaaatgcaatgttcgagaatatttacacacagtgcaatgcttgtattaaaatatgcagagctgagtacatagtcaaattaacatgagtaaaataatcccaaagactacaactttgaagatagtgcattgtctgagccaaagtagtgaagtagttccctcttcccttttaaagtcctttgtatgttaatgtggtttggagtggttggggtttctttaatggctgtttaaaggtcttttcatgatcttgctagcaaacataatgaaagtttttctgtagttattgcctcttagaagtgtgtaagtcttcagctgggcacggtggctcacgccagtaatcccagcactttgggaggctgaggcatgtggatgatgaggtcaggagatcgagaccatcctggctaacacagtgaaaccccatctctactaaaaatacaaaaaaattagccaggcgttggtggtaggtgcctgtcatcctggctaacacagtgaaaccccatctctactaaaaatacaaaaaaattagccaggcgtggtggcaggtgcctgtagtcccagctactcgggaggctgaggcaggagaatggcgtgaacccgggaggcggagcttgcaatgagccagatcgcgccactgcactccagcctgggcaacaaagcgagactccatctcaaaaaaaaaaaaaagtgtatatatatatatatatatatatatatatatatatatatatatatgtcttcacgtgctatgaaaaggatattttttttttaaaaaaaaggaaactttgaatctctgtcctcttttcagaaaattgagaggatcttgcaggtataaagagggtaagacacttctgtcatttacaggtgggagaagtggaaggttaaaaatgagatggtcctattgtgttaataaaacaaagtcagacaaacgtaattgcctggctaggtgattttcttttctactcagtgcatttagtgtatagccatgaagtttaaaaaaagtgttaaaagtgtatctgtaaaaacaaccacctgaaaaagttattttagtagttgcagtgaaaagctagaattcatactgtttcatatagggaagtatttccagtgagtagtgttttttggtcagaactaaaaattgagctggtttattccattttaccatgcctgtactgtagaggaaaggggaagtatatggaatacacttgtgaatacagtgtgtaggatacattaacagttttctgagtgggctgctcttttttcctcaatactgtatatatttttcttaagctcttctttaaaagataaatatttttcatacttctcttaaatcctcaaggattaactctgagtcaccatttgtggtattttaaatccttttaaataaatctctgtatttgcaactgaatcaaaacagtaaaacatttcacagggtaggatctgatgaccattttataatcaacatttttagataccacaagaggtacttatgagcatccactgaaattatggcattatgtcatataaatatccaaaaattcatttttttattcttatgtttatatataagaaagaaaaggctgggcacggtggctccctgtaatcccagcactttgagaggccgaggcagatggatcactaagtcaggagattgagatcatcctggccaacatggtgaaaccctgtctctactaaaaatacaaaagttagctgggcgtggtggcgtgtgcctgtagtcccagctactcgggaggctgaggcaggagaatcacttgaaccagggagttggaggttgcagtgagccaagattgtttcactgcactccagcctggtggcagagcgagactccgactttaaaaaaagaaaaaaaaaggcctttctgtgctacccacagaggggtccatacggcgttgttctggattcccgttgtaacttaaagggaaactttcacaatgtccagagcccttgatgtcctgcaaatgaaggaggatgtccttaagttccttgcagcaggaacccacttaggtggcaccagtcttgacttccagatggaatagtacatctctaaaaggaaaagtgatggcatctacattataaatctgaagaggacctgggagaagcttctgctggcagctcatgccattgttgccgttgaaaaccctgcagatgtcagtgttatatcctccaggaatactggccagagagccatgctgaagtttgctgctgccactggagccaatccaattgctggtcacttcactcctggaaccttcagatgcagacagccttctgggagccatggcttcttgtggttactgaccccagggctgaagaccagcctctcatagagagaggcatcttatgttaacctacctaccattgctctgtgtaacacagattctcctctgtgccatgtggacattgccatcccatgcaacaacaagggagctcactccgtgggtttgatgtggatgctggctcgggaagttctgcgcgtgcgtggcaccatttcccgtgaacatccatgggaggtcatgcctgaactctacttctacagagatcctgaagtgattaaaaaagaagagcaggctgctactgaaaaggcagtgaccaaggaggaatttcagtgtgaatggactgctccagctcctgagttcactgctactcagcctgaggttgcacactgatctgaaggcatgcaggtgccttctgtgcctcttcagcagttcccttctgaagactggagcactcagcctgccatagaagactggtctgcagctcccactgctcaggccactgaatgggtaggagcaaccactggaaggtcttaagctgttcttgcacgggttcttaagcaacatggaaaataaacatcagtatctaaataaaaaaaattttaaaaattacaaaaaaagaaaaaattaactccaggtataaggtgttagagtttgttagatgagctatgaagacttgacattacatggagtatagtaaagataaaaagttagaggttggttcaccttctatttactcaggccagattctctaacagaatatttttgaacttgattcatctaggagtgctcagagtttttgaggagcaaatcccaaaactgcacatgcaggtgaatgggtcttaacagatttggaagtgccccttgccttaatttcttctgacttgacacaaagtctgtaattccagcactttgggagactgaggctggaggatctcttgaacccaggagtttgagaccagcctgggcaacatggtgagacactgtctcaacaaaaagtttaaaaaattaaccagatgtggtagtgtgtgcctgtagccccagctacgtaggaggggaggattgcttgagcccaggagttccaggctgcagtaagctaagatggtgccactgcactccagcctgggcacagagggagaccttgtctcaaaaaataaaaataaataaataataaaacaaacagagcgctcagtgagtgtctgccctgtgaatgaaacattttttcagcatctgcaatgtgtaatgcacaatgcataggagttctgatcctttcttgtttgttattgggaaccacaattagagataaactgtcatatttagccatattaatacattattattcaggcttcattattaggatatgacttcttaggcccagaaggttgtaaaatgagctaaataaacatgcttgtggtacatttatgaatattatagttaaatacataaaggcattatcaaaagcatgtggatttattcttataatttattatctagagaaaatagagcagatatttcacctctctatggtaaattaacaagccaaatgaaatgcattactgatgcagaactttgctctgtagttcagctaaactgggctcttgtcacaagaccaggaaggattaggaacacagacacattgaagggtgaggggaacagaatttattgggccaaagaggaaaagaagaaaaaagtactctcaggaaagtgagagggggtcctcctaataggctccccacctcacagactgaattccaggccatcacccaggatctgaaaaggccaggctcctccctatatctatcactccccactctaaagaagtgcatctaactgcctttataataaggataaggatgaagaccaatcttaactttttcttgctgacaagggtccctgttttgggaaaacagcagtcagatccccctcagaggcttatctaagggttcctggcaaaaggggccatcatttgaggctccggttgcatgactgtttggagtttgatggcctgaaggcgagaatagacaaaccgggttattaaaaacatgtatgaaaacagaacggggttgcgggtaaatacagctaaaaaatcccaaggtcttttatcggtttgcacagggagagggaggccaaagcctgactggtaaaaaaaaaaaacaacaacaacaacaaaaccttttaccctttttccggcatgtcaggcttctgtgttcccttcccccaagcacaatcctaagtcaaccagtttaaggtttgggaaattaacttttcccagtttggaggctacatcagaggggcgtgtcccatagtacagagacaaaattacctatcagcaaagggaggacagaggaggaaaaagaagattttttttcaaaggagtcctacggattcagaatgcatttgaaaggggtacagactaaaggtgaatggctactcatctagaaagaggggagcaaagcatcccaggttcccttctcttcctagtgaatacccagagtatgtgagggagagaaagtgaagcatctctttctttcttccatcattatatccccaattcccagcaacctctacagggttccacccatgggtatcaaagtggccttcacctatgttaataggggggcctatgggggtgggaatatgtgctcttacccacatatgccctatctcccctgctgtcagtagcctttgaattccctagactgcatttatgccatggatattggtataacctttatccgtgaaaggagaagcctggcttaatcggtagggataagtcacactcacctgagctgtgccttttaacttccattattgtctgcctctggacctgtcagatctagttttatttcctagggcttttacccaaagcttagaattgagtttgagacaaaaatgtgtcttggggggttgtatggactctatatcataagctgaatgctaaggtgaagctgtggaattgagtcctcctccaacaagggagagaaaaggatgtcttgtgacacacccagataactggtggctatagttatgcttgctaagatttgggtgcatgggacctggctttggttagctcccttggtcttacttttccaaaaaggaaacctctgggtgatgggcatcctgtttattcccatcacttgacaagaattgcaggatatttgcttagaactagaatattgatccagatttatccatccccttagcttcttctgagctgcagccagagattgctggttggttcacaggaataagcagggtaagtttaaaatgtaggcaagaacttaaaaacaactaatgggtctagaatataatgacaaatgtatgagaagttttgaaacatttctctctctctccagtcctcatttttgttaaaaacaaatcactcataagtaggaattgaacaatgagaacacttgaacacaggaaaggagacatcactcaccggggcctgttgtggggtggggggaggggggagggatagcattaggagatatacctaatgtaaatgatgagttaatggtgcagcacaccaacatggcacatgtatacatatgtagtaaacctgcacgttgtgcacatgtaccctagaacttaaagtataataaataaaaataaataaaaaaaatcatgataggatggagttgtttgcaaaatagactttagtcttatacttggcccattatttgcataaagtgcagcaagaatttttatttatttatttatttttgagatggagtcttactctattgcccaggtgagagtgcagtggcacaatctcggctcactacaacctccgcctcctggattcaagtgattctcccacctcagcctcctgaacagctggtactacaggcacgtgccaccacacctggctaatttttgtatttttagtagagatggggtttcaaccatgttggccaggttggtcttgaactcctgaccacaagtgatctgccctcctcagcctcccaaagtgctgggattacaggtgtgagccactgtgcccagcctgaataattaatttaacataggccttttagatcgactttgttccacaaggagtctcagataggactttctaaagccaagtccatccatgagtttgtaccctcaaatacttgtgagttgggtaaacgcctctcttcttgagatcccaagaacatgtgggtcctgggcctgttggaaagtggcattctctactcaccacaggttaggaaccctgtacggggactgtgtagatgagctatgaggccaattttcccaaggggctgaataaagattcagctctgcaagtagagcttgactccttaaagggaagcatacctttctagtcaaagccttggtgaaacaaccagtttctccaattgcatcctgttgcaaaagaaaatggattcttactgcattgatgcaaacaaccatattgctataagttaagaatactcacaactagtttccaaattctggagaagagaggcagagagacaactatgctccaaattttgttcacaggattataccttactcaattattaaaggccatgaatagctcaaaataagtttccttggactctgataaacaaagatcagcagtgttccaagcaaaagtcaaaaaggttacttcagttttctgtgagttcagtccatttagttaactcgttttgcttgatgttcgtgaacatttcagccctccatgaatcctgtacatttttcctttattccaatgtcacaatctcccaagttatcagaaacctacatttgaaagcacctgtcaaagttctgtagctgattataaacatcttttgaagaggatcaaaacaagacaattgtcagtgagtaatgaaatgtctacagtagttacagtcagaaacacaattgaaaaagaaatttggttatctctgtggtttacaataacataacaaccttaattgtgattgatagcatatactcagacattagaattttagaaatcccatacaattttggaacatatattaatattattccctaagatataacctgaagaagattaaacatcattttggcaatcccatgtacctaaacatgtcaaatagtcctgtttatctgtcttctgggtgctccaggagccctctgtagcatccagaaagccaggtgtcagcaaagacaattttgaaactgaagtttgattttgggaagcctgttaattatgttagagggttaaagcacttgatattatgaaatagaatttcagattaccataagttatttattttgccaaaatgatgactcaaattcttgaaaaagcagaaaccttttataaccccttaaaacttttgccatagagattagtgccttaagagtaccttattgtgcttttatttcagtgctcaatttacagaaaaaccatattatatgcttttgaatttagttaatatgttcacacttggaatttcttttgcaagattaatttttacaatcctttcacaacttgtttgaacttctagctttatcttatctaattcaaaacaatcctttaaccccaggcaaaaatttacattttgacatctgcattttaccaataatctttaggctttttctatgtctcaaagattaaagtcacgtgaactaaaaggtaccacacagcttttatctaccctttcaatatttgatccaagcacctatccttctttaattaattagagctctttttatagacatcacccagacaacacatatataactacacagacaggcagaagaaaatccagtaaccacaagatttttcatttgccaacctccgggttgagcccataaagagacaggattaggaaaacatgaagcttctaaggcctaataaacagttataactgggaggcaaaaacagattttgagagggatctattcacttttaatttctggggtttcatgaggaaaacagaggtctctcccctctcatgcaagaattaagggtggcaaggcaaaatggagaaaaataattcagttgactagaaaaagcccttttccagcaaaacaagacccaggaagagaaaaacataaaggccttttaaatatacctataatttggatatccacttttaattaagctgagtgctctttaagaaaattcttttaaattctttgttatccgactttagctgcgcgaagtggtcagtgtttctggctttcaaactttactaaaggctcagagaaaggaaaacccaaggcagttggtggggaggaagagaataaacaaatagcaaaagtcacatagatatcaaaccagaaaggactctgcctgagctaggattgagcctgggccaccattgtaaaatggcggaggctaaacaaagcattgccacatggttacaggtcacacttccaaggacgtaaaacaagatggaggcctgcagcaaagtttgctactgaccatacagaaagacatgcaaagcacaccagattggctaaagcttaagcccaacctcacaaatcctttttcataactaaaactttacagagaaagaagaagcagttttccttatcattcttggtctagcaaaactctgaaaaaagaaaaaaaaaaggcctcgctttaaagctaactcctgacctggtggagaataggaaaagacagcttaaatgcaaggctgtgttaactgctgacagcgtggagaaaagaaaaagatgcctggggaagaacctgtcatatgcaaataggtttcttctaccgggagagagacatggtggggaatgctggccagcccactgcgcagggccttttggccttagccactgctgtctaactcgaaaaaagaaggaaaaggccaacattcctgatccctgggagtgacgggagttgtggggaggcataattccctctaacctcagaagaaatctgaagacaaaaaggcttagaaatgaaaggtaaaaagattttttggtttgcatcttaccctttctcatgccccacattcgggcaccaaaaatgatgcagaattttgttccttagttcagctaaaactgggttttgtcacgtgaccaggaaggattaggaacacattgaaggacactttgagggaaacagaatttattgggcaaaaagggaaaagaagaaaaataaacttccagcaaagcgagatggggtctttctaacagattgaatacaaggccaccacgtgggaactgaagagacttcagtttcaacccagctttttctgttctataataacaaattttaagaacaaatttattcatgtatgagcatttgcctttttctgcattatttatggccttctattcctaaacagactaacagcattttttctgagcctttaatatacttggttatgtcagtgactacagcgggattttattctagaatttcacatggttttcaaattgcttcattctgcacaatttagctcttttcatatttctctcagaacatagttaagggaataataaattacttatttacttgctggacctctttccatgaaaatactacaaaaatccactaaatggcaaataaagttatgagctgagggaagaggtgatgccttaaagaagctgtttccttgaacatgaatagactttattttcaccagtcccagaattagaagtatttctctgtagtctgctaagaggtagaaagaaaagaacgatcatcgaaataaacagggtaaagagctggccctggtactcacaggaccacaggcctggtaaatactatgtaattaaatgggtctccttggaaggttgggttggcttaggaagcacttcattatcatggagttttaaagtatctttctcttctgctaaggttgtagaacagcttccttctcatagcctcaaaactgaagactgttcaagcaaaggttagccatggcttttttagaggatctggaatatatatagagtcctactctttagatctctttgacaagaataaaaaaatacttcctgtataaaggtcgccatttagatagtgtttgttttagctgacattgtcatgatttattctgtttttgtgtgttgaaacaatttgtctccaaagtagctttgtttttccaaaaattgtttaactgtgatagacgtgatagttaaactttggtgttgcagatcctgtgaagccacctggcagctctttacaagcaccagctgatttacctttagctataaatacagcaccaccatccacccaggcagattcatcctctgctactctacctcctccatatcagctaatcaatgttccaccacacctggaaactcttggcattcaggaggatcctcaagactacctgttgctcatcaactgtcaaagcaagaagcccgaacccaccaggtaaattatatatgcccatgtgagagagagacagaggcgtgtgtatgtgtgtacacactgagattcttacctttaaactttttaaatttcgatttgcaggcttgaaagagaccatctgtataggcatatgtttcaggctttatatttcaggtttacattcccctattgatttccgatattcaggagattgtatcgaagagacacaatctctgccatctttggcaaagagcagttttccctacaaggctcttttggaaatctgtctcctattttgtagtctttgttacagactcacagtattacttgcttaacagatttcactgatttataaatggtgatcttgctccatttcttatgtgattgtaaaccagccaagggtcatcttttgtttctgaagaaggagaggaataccttctactagaagattttgaaagcaaaacgattccattgcagtgagtgtgttgtggtggttttggatctgtgtgagaaattaatcataaggtaaaatcccaatatagcaaattccatggaatatacaaattggatgttagtgaaatttgatcaaataaatatattcctaaaaattacgaaacttttagtcttcatatctagcaatgaagcagagcttaccctaagcctttttatttatctttttttttttttttttaggagacaagggcttgctctgttgcccatggctcactcatagctcactgtaaccccaaactcctgggctcaagtattccttctgcctcagcccccaggtagctaggacttcaggtgcatgccatctgtatgctggctggctaattttttctttgtagtgacgaggtctcactatgttgcctaggctgatctcaaactcctggcctcaaacagttctctcacctcagcctcctaaagcactgggattgcaggtgtgagccactgcgcttggcctccctttacaaatttttaagtagaagtatatggagtgcagcacttgactgaaggaatgaatcatcaagcctgtcccaaattcttggtttctctaccatctccttccctgcccccacacccctttcctcttctaagctataaggcattttaattggatcctccttgttacttgatgttgaatagttagaagagttaaggcaataaagagtcaagaagcagttgttttactatttttaaaaggagcagaaaaatgatgattgagaggccaatctctgccattagtagctatgtgacaattagtgataccagtcaactgagtacattttatttatgtattaatcagctagggtctggatagagagtatatttctttatagacatgaaaaatgtttttttaaacaagattataattaagcattattttatgacagatttttttttaatgtggaaaatgattattactgggctaggatcagacaaagcacttgttcaaaaattttaatgtagaatatgttaagattcacgaaatagtttctgtgaaccatgccctgagatgatggaaatagctcatattcattccaaagctggatttctatgtatttgttgtaatgggattttacctgtaagagcagaaaaaaatttataaatcaacatttgttaatatcaaattctaacttgattttgcttgtttgctgtgagtatctaaaattatacactggcaactttgttacctatgctactaactaatattttattttacaaaagtttacaattatttttcattagcaactttttagaagccaacagccaagcgacagttctcagtatattttatttttatatagtgtatttcattgatttcactggtatcacagctttcctcttgcagtacaacttatgctcaaaatcatcacccagatgtattttgctatctatattttgcaaaagtgacagttaaatagcaaatatttatgaggtaaccactatgtgcccaatattatgctaggtgctatgaaggtacaaactatataagatatagtctactcagatatagtcacctttggagtttacaagtaagagttgctaagaagtgaaaacatgcaagcattaaatatttagagatgaagataatataccagagttgccttgcaaactcttgtttgttctgcaagactttagttagaatgtgctcctctaggaagcattcctctcaaactcccaagttagcttaaatatctttctgggtttttatagcatcctggttatgccttcatatcttgttttatcgcagtgttagaaacgatgtttttacttactcttcactaactgtaagctagtcagagcaaggagctttacttattactcataattcctctagcttctcttaactctgcatttgaattaaatgaagtacaaattttagaatatgcataggtgcattagaaattccacaaagggacagtgcaagtgtttttaagatggagaaaacaaaagcttcataggaagaatggaatgtgaactacacctagttggtgagagaagaaaatcattagtaatttgtgcaaaaatagcttgagggaaaggagagatgtgagcaagcatggtgggaggaagataatgaggaggagagcctcttgaagaataggatggagaaggtggagccaggttattagtaacctcaatgtcaagtggattagtgtgaggccttatagttcccacaccctgtaggggcccttactaggtttttctcttgaatacatgagtggtataacaactgtgttttgaaaatattgatcttatagaagtctggtcccatgaatagattgaaagaggcagacagtagaggaaattccactaaggagagttcagtcatgtagatctcagcagggatggggacctgaacttgggatggtggcaatgggaatagagcaagggaataagtacgcggctaagaagaagggctcggtgcctgcgtgactggaaatcaaagagaaggaatcaagctgattgagttttaagcctggagaatctggataaagtcatttctttcaatgcaagccaggaaaagcagtcaacttaagaagtaaatggatttctatttgaggcccacaagcaaggtaatactggagtaaccaagtagaaatattagtttgagaatatgggacttggaatttggtaagatgatggaagttgtcagcattcagagaagaaaatgaagttctgaaaaaggaggatgatctctaatagcgtgtatggtaaaaggttagaggactgaactctgttggccattcccagggagagagacgggaggaaggagccagtaagtgaaacaaggaaataatcagcaagggagaagggttttaagatctttttaagatggagaaaacaaaagcacaatgtggcacaatgtgggttttctgatagtaaagggggagactttacagagcgtagtgccacatgttactaagaagtcagggaaggtaagccctttaaaaaaaaatcatagttatttaaagaaatattgtttaaattcctacaggactttggacaacatgcagaagtagttcaggtatcttgtttagcattaaggaagtgagagtgtgcttgtgttgttagcttcatcttgtcgtatacccaaattttgtgatacctcaaaatgcagagaccgaaaatgttcataaatgtactttaatgagatttctcaaagtgagttattgtttggagttggttaactctgtatcacgtatttcgatcctctttataatgttggctaaatgtttgttaaagaaaagtagtggaaaggaagatatatgaaaacaattagatgttaccttcttgtaagtcacattgaccttattcaataccaagtaatcattagacttttaattttacggaacaacaaatttgccgtggggaggtttaagaccaatggatcaactatataaactgtactagcactaggtttttgcatgctcttcagaggaaatgcttttccttgtgtctatgcattaatcatttacctttcccagagttttgtaatgtttaattccagtgcttcagggattgtgtttttatgtgcagatttaataggtggagttgggggtgtgggcagatataggacagaattagagagaatgcttttcttggttttgtggtggcggttttgttgtctgatgtataatcataaaggctaaagaacatttgtgctttaaatcctatggatcacacaaaaaatctaatgagaaaagccctatcttttgattgcttagcgataaacatgtttataaaaaatgtattcttagtctccaccttgtttattctgtcattaacaatttttatttagaacgcatgctgattctgcaaaatccacctcttctgaaacagactgcaatgataacgtcccttctcataaaaatcctgcttcctcccagagcaaacatggaatgaatggcttttttcagcagcaaatgatatacgactctccaccttcacgtgccccatctgcttcagttgactccagcctttataacctgcccaggagttattcccatgatgttttaccaaaggtgtctccatcaagtactgaagcagatggagaactctatgtttttaataccccatctgggacatcgagtgtagagactcaaatgaggcatgtatctattagttatgacattcctccaacacctggtaatacttatcagattccacgaacatttccagaaggaaccttgggacagacatcaaagctagacactattccagatattcctccacctcggccaccgaaaccacatccagctcatgaccgatctcctgtggaaacgtgtagtatcccacgcaccgcctcagacactgacagtagttactgtatccctacagcagggatgtcgccttcacgtagtaataccatttccactgtggatttaaacaaattgcgaaaaggtcagctctagttgacttcttctctattagaggttaatgatagaaaatcgatttttctgaatatttgttcttttaagcgtagttaaatatactatgctacaaaatacagtccatttttttccagctctacagctacctggaagggtatattgcattcatgctctgctggaagggaaaaagagttggagtttctcacccctgaagaagtatggccttagtaatgccttcctgcctcaggaagtgtgcccttctctctcccactttctataatcctgggtggataggccctctgttgggacagaagggcaggaaatggaccagccacaaagcctctccgagtcataccctttcctgtatttgtgtgccattatggccgcttctaagtcacatctgttgggctctatttccttccttcctatataagcagtttttatgttgtgtctaacaggtgatattctgttccagtcaagccattatgctgtttgatttttacttgtgtttaaagagctgaatcttctttccccttatcactacccacttcactcattgctagtgagtatactttcctatactgtctcctagagtctgtatccaaaagttacagaccttgagaggagaagaaaaaaatgagtctgggtgattctctgagattctcaaagtcctacaaatagaaagctaaagtttttaatgcacatatcctaaacagtatgtgctaaaatttctgtattttgtggtagagttttcctcagctatctccaagattttaatgtatctgtgattattacttaaatcagtacttatttcaccattcaataacagtatctaactcctttcttgaagtgactgtataacctggttatcagttagtgagatgtaagttatgcccaaggtggtgcaaacgatgagaaaatagaggtgtttctcttcatctttagataacctatcttatcccagacttagacattcactcacactcaaaattagatattggtattggttagcatatgagtgagtgtctgcattttctagtggtttaatatgccaattcaagacacagttctatgagcatcctttttaaaattctgtgtgtgtgcatgtgtgtatgcatatgtataatgagagaaagataataggtcatcccaatgaccctgagagctggcaaagatgggaataaatgttgatagtttgttctttattttagatgctagttctcaagactgctatgatattccacgagcatttccaagtgatagatctagttcacttgaaggcttccataaccactttgtaagtataattgaccttggcatcatcaagtgtatttcattgtctaaatcttcataattagtgccatgagactaagtgatatcatgaaataaaagtacgctgagatccatatgaatgagtgtgacttacaattgtgttttcatgtgtgacaagagtttttgtttattaaaagaaatatatatgtgttttagaaagtcaaaaatgtgttgacagtgggaagtgtttcaagtgaagaactggatgaaaattacgtcccaatgaatcccaattcaccaccacgacaacattccagcagttttacagaaccaattcaggaagcaaattatgtgccaatgactccaggaacatttgatttttcctcatttggaatgcaagttcctcctcctgctcatatgggcttcaggtccagcccaaaaacccctcccagaaggccagttcctgttgcagactgtgaaccaccccccgtggataggaacctcaagccagacagaaaaggtaaggagagcatggcaaagtaaaaggcttggggagtgccaagttagatctatctttaactgccattaaatccaaaatagaatttggactagaaattctgaaatatttcatagttccatagccatcaagttatttaagcaaagcagtactgccatttataaattaacaattatgatatcacatgttgatgtgaggtgatatttataagtctcctatctctagagcagaggttacaagctgaaatactcacggggtgagcggacaactggggagaattagaagaaactggactgccgtagccccatctaatgggagtaactaacctacactgctacaatcctttgttgacttgtgaaatgatgcacccatgcaggcaaatcttctggtatatcaggaaaagccagagatttcagattttatatgtattatctctcaatttttaaagttctatcaactaatttaattattaagaaaacattgcaggccaacccaaacacttctgcaagctagataatggccttcagctgctatttagtaacctcttctccagagtatataatatcaaatcagacttaagattattaatgtatttgacataattatttaagaacagtgagactgtataatctttccattctgttcatataacaacttcttaaaaattactttgcctttgctggggtaatacatgcttctagtctgtcatttttttttccatgctggccttcataagtaacattaagttctaaggtaacatagtttgttaagaagtctgtaaaagaaactgttcagccaaattgggtaatgcctacccaggttttttaaattggggtttaagttgttaaaacacagacaatttgatttgttgcaccatgctgttagtgtggcttaatcttgacaaccaagtaaattagcataaatgtaaatgtgatgaatgatacaatatctggcttacattagggtgtttcagcacatttgaaaagtctcatgtgctatatgtagctttttaagaccacataatgttggcatcaatttctccttaacctgggcttagatcattaatattagttctaattaagtcctagttgtgaggaaaagagactgaggctcagactatcttaagaaaaaagatttggttttgtttgtaagtaaggataacctcctcgtttcaacaggaggttaacctccttcaacaaggaggttatcaggaactgaagcaattctaggggactgttgctgtgtcctgctctctctgtgcatttctgttttatgggaaatctttgcatctggtttgttctctttcacattcttcccttcttttctgttttcttttctgattcttttttgttttcttactctgtatcctctacttaaatggattctgctttccaagagctttggcctccaatgctccccttctatggcctcagttctgcctcctagctgctttttatgtgcccttgcagcttctgcatcagcttctcattgccttacttattatttactcactttagattgcttagagatgatgtgattggtctatgtgtgtcacacccacgacgacccagtctgccctggcagcagggctgtgattgcggtgtggatctcagaaaggatgtgagcatcagaggctttctatcggataatgcttccttttgtttcctttttctttgtctctaaatctattttagacaactactagtcattttctttgcatataatatgcaaaaatatgtttggacatgtatagctttataattggttcatacagatcactgaaggattgagatataagtgtcatgaactctttgaaatattgaaatatcttttttaatgttaaactggtgctttccttattttccagtaacgagtgcatgttagtggcagatctctactttttaactccaaacctaacagttttatattttgaggtctcgcataaatgtggagggagtaagatttgggtgaggttacaaagcttttaagtcctacctcccttgctcctctgctgctcttttctccccttgagctctgtagagcacagtttgaaaactccagtatatttcaacagttgtgattccatgtggtaagcataatatgaaatcaggaaacaccactgtttataagttagaaaagacctaagatcaattaatgattagcttttagtatcctctaggtctgatatcactcatgtatcccacattattatgatatatattttatgtatatatcagaatatatactatgtatcatgtatactacatattttataattatacatccctatgtatttagtgaaagtactattattctagtacactagagactaatcacactagttctttaacgtaaaagaacttaatagaacagaataaagtaggttcttatttctggagattgtgttcattcttttaaaatttaactgaactgttcagagacaattgtgagttcgttggccacattatttatttggcatatttgcttagatacaaaatgaacttaaaaagagcacccagattgaaatacccatatagtttttgccagaatcaagaatagacttagcaaaacagtaaagaggttcctgaagtcatagtattcaaaaaaaatttacttttctttagtactattttacttttttttttttttttttttgagacagagtctcgctctgttgcccaggctggagtgcagtggcgcgatctcggctcactgcaagctccgcctctggggttcacgccattctcctgcctcagcttcccgagtagctgggactacaggcacctgccaccacgcccagctaattttttgtatttttagtagagacggggtttcaccgtgttagccaggatggtctcgacctcctgacctcgggatctacctgcctcggccttccaaagtgctgggattacaggcgtgagccactgtgcccggcctgtactattctactttttaaatagttatgatacaggagaggaggcttgagaatgtatttaacattacaaggcagactttgtaaactcactttacaaagttatgacttcataaactcactttacaaagttataacttcaagaaaaacacattttaaaatccaaattcagatctcaaagcaaagtttatccacaaacacttaaacaaaaataatgtctcgtttggtcctataatttttctcagtattcatagcatcagatgaatctattttaatttcaaatttcatgacatcagataaatgacttaatctattattcagtatctcttatataaaactcattataagcaaatctaattctataaaatatggcttgattagtttcagagctccatataactagttcattgccctatatgtctggtttttgagattgtctttggaaggatctataagaaaccagtaacattctagtcttgtttatagccccaattatagatgtcagctgctgtagtttgcatacagatgagcttttcaaatacttatgagtaattgaaactgcagaaatacatagatgttctgaacacttaaacataattatcttagaccctttgcctgtcactcaattcatgatagtgatattttcatcatactatttctgtcactgtagtgtttgttttgagccaagttttgtgtgtattaagagaaacgtattttaagcatactgtattaaatattgggaaagcagatgagtcactggaaatacaggacaaattatattttgacctcttcaattgaaaattttatatttctgatggaaagggagttttgtaaagtttgggaaatttatctgttatagcttctctttatgtcatgacataaatctagtatattaaatcgctaaacttatctaaggcccccatctctgtctagtctctgtctagcatgatgcagcagctgtgtgagccccacatgctgtctttatgttgttatgtttggccttgtccattcacgcctttctgcaacagtctgaacattagttactatactgacttttttttgttaagccagtgcaaggttttgtatggtgtttttatacaccactttggttaaagtaccttcaagcttagatccttaatattgtgtggggagcatacagaagactaatcctgagagtttccctgggtgactcttttggcacagtgatggatttgctctaaacattttttcaagagatcttttaaagtttctgaatgtgattaaaaattaacatgcactttttaaaatttttattcttttgtatttcaatttttattttagttttaggggggtgcatgtgcaggtttgttacctgtgtatattgtgcgatgctgagatttagggtatgaatgatcctgtcactcaggaactgaacatagcacccaatcgttagtttttcaaccctttccacctgcctccttcccctctctggtagtacccagtgtctgttgttgccatctttatgtccatgtttagctctcacttgtaagtgagaacatgtgatatttggttttctgttcctgcgtttatttccttaggataatggcctccacctgcatctgtgttgctgcaaaggaaatgatttcattctttttatggctgtgtagtatatgtaccacattttcttgatccagtccactgttgatgggcacctaggttgattccatgtctttgctattgtaaacactgctgcagtgaacatgcgagttcgtgtgtctttttggtagaaagatttgttttcttttggatatatacccagtaatggaattgctaggtttaatggtagttctgttttaagttctttgagaagtctccaaactgctttccacagtggctgaactaattttacattcccaccagcagtatataagcattcccttttcttcacagcctcaccagcatctgttgttttttgactttttagtaatagctgttttgactagtgtgagatgatatctcattgtagttttgatttgcatttctctgatgattagtgatggagtattttttcatacatttgttggccacttgtatgtctcatttctagaagtatcagttcatgtcttttacccattttttaatggggttacttgttttttgcttgttgatttgagtttcttgtggattctggatattacctctttgtcagatgcatagtttgtgcatattttctcccattctgtaggttgactgtttactctgttgatagtttcttttgctgtgcaaaacctgtttagtttaattaggtcccacttctcaatttccggtttgttgcaattgcttttgaagacttggtcataatgcctagtttcttgagggttattatcaggaggagacattggattttatcgaaagctttttccaggtctattgagatgatcatatgttttttgtttttaattgtttacatggtgaatcacatttattgatttgtttttttgtttgtttgtttttaattatactttaagttttagggtacatgtgcacaatgtgcaggttagttacatatgtatacatgtgccatgctggtgtgctgcacccattaactcgtcatttaacattaggtatatctcctaatgctatccttctaccttccccccaccccacaacagtccccagagtgtgatgttccccttcctgtgtccatctgttctcattgttcaattcccatctatgagtgagaacatgcagtgtttggttttttgtccttgcgatagtttactgagaatgatgatttccaatttcatccatgtccctacaaaggacatgaactcatcattttttatggctgcatagtattccatggtgtatatgtgccacattttcttaatccagtctatcattgttggacatttaggttggttccaagtctttgctattgtgaatagtgctgcaataaacatacgtgtgcatgtgtctttatagcagcatgatttatagtcctttgggtatatacccagtaatgggatggctgggtcaaatggtattgctagttccagatccctgaggaatcgccacactgatttccacaatggttgaactagtttacagtcccaccaacagtgtaaaagtgttcctatttctccacatcctctccagcacctgttgtttcctgactttttaatgattgccattctaactggtgtgagatggtatctcattgtggttttgatttgcatttctctgatggccagtgatgatgagcattttttcatgtgtcttctggctgcataaatgtcttcttttgagaagtgtctgttcatatcctttgcccactttttgatggggttgtttgcttctttcttgtaaatttgtttgagttcattgtagattctggatattagccctttgccagatgagtaggttgcgaaaattttctcccattttgtaagttgcctgttcactctgatggtagtttcttttgctgtgcagaagctctttagtttaattagatcccatttgtcaattttggcttttgttgccattgcttttggtgttttagacatgaagtccttgcccatgcctatgtcctgaatggtaatgcctaggttttcttctagggtttttatggttttaggtctaacgtttaagtctttaatccatcttgaattaatttttgtataaggtgtaaggaagggatccagtttcagctttctacatgtggctagccagttttcccagcaccatttattaaatggggaatcctttccccatttcttgtttttctcaggtttgtcaaagatcagatagttgtagatatgcggcgttatttctgagggctctgttctgttccattgatctatatctctgttttggtaccagtaccatgctgttttggttactgtagccttgtagtatagttagaagtcaggtagtgtgatgcctccagctttgttcttttggcttaggattgacttggcgatgcgggctcttttttggttctatatgaactttaaagtagttttttccaattctgtgaagaaagtcattggtagattgatggggatggcattgaatctataaattaccttgggcagtatggctgttttcacgatattgattcttcctaccgatgagcatggaatgttcttccatttgtttgtatcctcttttatttctttgagcagtggtttgtagttctccttgaagaggtccttcacatcccttgtaagttggattcctaagtattttattgtctttgaagcaattgtgaatgggagttcactcatgatttggctctctgttattggtgtataagaatgcttgtgatttttgtagattgattttgtgtcctgagactttgctgaagttgcttatcagcttaaggagattttgagctgagacaatggggttttctagatatacaatcatgtcatctgcaaacagggacaatttgacttcctcttttcctaattgaataccctttatttccttctcctgcctaattgccctggccagaacttccaacactatgttgaataggagtggtgagagagggcatccctgtcttgtgccagttttcaaagggaatgcttccaatttttgcccattcagtatgatattggctgtgggtttgtcatagatagctgttactattttgagatacatcccatcaatacctaatttattgagagtttttagcatgaagcattattgaattttgtcaaaggccttttctgcatctattgagataatcatgtagtttttgtctttggttctgtgtttatatgctggattacatttattgatttgcatatattgaaccagccttgcatcccagggatgaagcccacttgatcatggtggataagctttttgatgtgctgctgaattctgtttgccagtattttattgaggatttttgcatcaatgttcatcaaggatattgatctaaaattctctttttttggttgtgtctctgcccggctttggtatcaggatgatgctggccttataaaatgagttagggaggattccctctttttctattgattggaatagtttcagaaggaatggtaccagttcttccttgtacctctggtagaattcagctgtgaatccatctggtcctggactctttttggttggtaagctattgattattgccacaatttcagattctgttattggtctattcagagattcaacttcttcctggtttagtcttgggagagtgtatgtgtcgaggaatttatccatttcttctagattttctagtttatttgcgtagaggtgtttgtagtattctctgatggtagtttgtatttctgtgggatcggtggtgatatcccctttatcatttttattgcatctatttgattcttctctctttttttctttattagtctttctagcagtctatcaattttgttgatcctttcaaaaaaccagctcctggattcattaatttttgaagggttttttgtgtctctatttccttcagttctgctctgattttagttatttcttgccttctgctagcttttgaatgtgtttgctcttgcttttctagttcttttaattgtgatgttagggtgtcaattttggatctttcctgctttctcttgtaggcatttagtgctataaatttccctctacacactgctttgaatgtgtcccagagattctggtatgctgtgtctttgttctcattggtttcaaacaacatctttatttctgccttcatttcgttatgtacccagtagtcattcaggagcaggttgttcagtttccatgtagttgagcagttttgagtgagtttcttaatcctgagtagtagtttgattgcactgtggtctgagagacagtttgttataatttctgttcttttacatttgctgaggagagctttacttccaactatgtggtcaattttggaataggtgtggtgtggtgctgaaaaaaaagtatattctgttgatttggggtggagagttctgtagatgtctattaggtccgcttggtgcagagctgagttcaattcctgggtatccttgttaactttctgtctcgttgatctgtctaatgttgacagtggagtgttaaagtctcccattattattgtgtgggagtctaagtctctttgtaggtcactcaggacttgctttatgaatctgggtgctcctgtattgggtgcatatatatttaggatagttagctcttcttgttgaattgatctctttaccattatgtaatggccttctttgtctcttttgatctttgttggtttaaagtctgttttatctgagactaggattgcaacccctgcctttttttgttttccatttgcttggtagatcttcctccatccttttattttgagcctgtgtgtgtctctgcatgtgagatgggtttcctgaatacagcacactgatgggtcttgactctttatccaatttgccagtctgtgtctttcaattggagcatttagtccatttacatttaaagttaatattgttatgtgtgaaaatgatcctgtcattatgatgttagctggttattttgctcattagttgatgcagtttcttcctagtctcggtggtgtttacattttggcatgaaccactttgcaccttaggagtaaagcctacttgatcattaacatgctttttaaaaactacatgtatacactaataagtgtttggagaatgtatgagtaataccagtacatgaaactagattttgataaacaggtattaaagtttaaatcttaagtcaagctttgcgttagatttgttaccgtttaaaggaaataagtatggagtgcatttttacagcagagccttaatgtggggttttttcctctcaatattctcttgacttcaaagtataattatcattattacatttctctttataccatgagaccattaaaacttataaaaatttttcagttttctgccttcattactttctggaattaacaaatgataatgtgaattacttttactctttcttgattttggggatgcctactggaagtagtagcataatctgcaaaactttgggaagagtaaaaaatttaggcttaaaaaaaatttaggctttgtaaagcctgtaataatacagaaaataaaatgtccactttgtgtggaatttatgtaagtagttacctattagaataatgcattaatagatcacatctatttaattgaaatgtgacctcacatgactgccttgactgtatttgagatgaccgacttgaaatacccttagaatttagttcttccctttttccatttaaatgacaagcaaaaatggctgggcacagtggctcagcctgtaatcccagcatctggggagaccgaggtgggcagatcacctgaggtcaggagtttgagaccagcctgaccaacatggtgaaacctgtctctagtaaaaatacaaaaaaattagccaggcgtggtggcgcatgcctgtaatcccagctacttgggaggctaagacaggagaattgcttgaacctaggatttggaggttgcagtgagctgagatcatgctactgcactccagcctgggcaacagagcaagactgcatctcaaaaaaaaaaaacaaaaaatgtgtgagattgatcaggttaaacaccactagctttaagagaaaggcagttcattaacattcatacaacacagatttaagcacctatcagttacaggatataaattctccaaacaaggaaaaggttgctcccctgaagaagctcaccgtccaggacccctgaagaagctcaccgtctaggaggggatgtggagaagtaaacacattatcataattaccgtggaaggggctgtggttgaagtaaactcttggcactattagggaagctcccctgaggaaagtctgagagtgtgagtggcaattaaatgatggtaggggagggcagcctggcaaaggatcttctcgttagaataaacaacatgcccaggtcctttaaaaagaggggagatgagacaggcccagagtcgtggggaggtaggtgggcgggcaaaaaggagggaggaaagtaccaaaggagggacgaatgccagatgccttgcaggttcctggtcctgaaggagttataatttatgataatgagtttggactttattctgagtgtaccattaaagaattttatgcaggcacataaactttaagatttatatatttaaatcttaagtcaagctttgggttagatttgttaccatttaaaggaaataagtatggagtgcataatcagaatggctctagaaagctcattctgatttaagaatacaatagagaaaataattgtattctttaatgtaaaatgttataaaaatcacttttctttctcagagagtgctttgcccagttttccaaatccagggttcttgaagtctttgttgagacaggatcaaacagggaaggcatagcaaaagtccccctgtctggctccctcaacttggggaacttaacagtgatttttggaagttttgaggcacttggagtataagcggaactcatacagccatacagtgcgagttcatcactttcagagaaacaaaacaggtaaatgaagtgctcatttaaaaaaaaaaaatcagacaaacaattttttattttctggtgtgaatgtctgaagcacgtcagggccttcattttaaaagagcaccccgctctttgctgctctgtttcttagggttgtgtgaaatcgtggtgctacattaagactagctttacgttttgccttgacatcagtgtttgcacaggaagtttttatgcagtttgcaaggctattttctttctttttcttttagagacggtttctcactatgttgcccaggatggtctcaaactcctgggctcaagtgatcctcctgcctcggcctcccacagtgttgggattacaggcgtagccactgtgcgtggcctgcaatgctgttttgtttggcatacttggggacgattccttataattaaaattgtctcattttttttgaagggctttagcttttaagagtttagaagtgtcctcctctgtaagagagcaaagcaaagggagggtatgaatcatatgctgcacgctcttctagatggcatatattttctagttagcgtgttttcatttttttcttttaaaaaccattaaaataagttacagtgatgaggttacagtatacagcagtatattagaaaaatattagaccaagaatccaaaaagccagaattcatttctggtaatactattaacaaccactccctcccattaaatgacattgggcaaatccgttgacttttcttcacataaattttcttattttaaaatgtaaaattagatcatctctaatcgtactccaaattagggagcagatcacatgatcaagagattgatattaacaaccctcctaaggattaaagcacagatagaaatttccccagtagtcagtgctcttcactaaattatgctgcactctttgttcaaaccaagtctagcaaaagccaagttgtaactaactgccttggacttaaacattcaggctcacatgagttctctatttattctcagaatttaagagtcaccaaaattggtttatttttgcctttgctttagtattcttatgtcttattatctattttcacacttttcttcagcaatcagtaaaacattggcctattatatacaggcagtaaaggaggagaaaaggctaagacaggcctccttacaccttggactttttttctcgtttctttccgcttaagtaatatagggctattctttgggcatgattttcatttctgtctggaacattaatgtcaaattgagtttggaagcatagagaaatccagctaacaaaatgcctaagtaacatagtacaatttagtgcaacatttccacattttagcttctgccctaaaattaaccttaagctttgcacagagtagaaaatacacgtaaattttataaatgtatttttaaaaatttcaatatgattatatcatatttttctaatacgaaaaccaaggaataccctagaaaaggagtacccttttagtacccaccccagaaaaaaaggtaatgaagatgaagaagaactcgagtgaaaggcttactgatttcatgcatctgcttttggctcatacgagtctccttggaacatgtgacatctttaaaaattacttaatccacattgtcttcatcattacaatcacttacattttatatatgttttcactgtaaccaacaagaaattactggtcacgaaggtaaacccttcagagaaatgtaacgattttacatctctgatgttggaagcacttaaaatttagttgagagaacttactgtatacaaaagcaacgcaatacaaatactcttctaagagtaactatagtaaagattgtaggtttgaaataaggatatgggactaagaacatgaaccctctctctagattcacagaatttaaattctagctctaccagtcatcatctgtgtgactctgggcaagttacttaagttctataagcccccaaccagcttggtaataaaattattaaaatttcttttaaattgtaccttccttacatggttgttgggaggttttagagtgtctagtacctaagaactcctcaataaatgttcatgattaagtgtaatggcatttctctgggcagtcttagagaatgtattctaacttgagctttgtgtagaaattaaagtcactgattgataaagcagtgatggatattgatagtgaaagaatgtagaaaagggctgaaattttaaagatgtacatgagaaatagagaacagaatggtctagccagagcagagcacaattcaagagaagaatgtgttgtaaacacatccgtattcttatggcatttccatattctccatgacttccccaaataagtcatatgtattctgtgttcttgtctgtaaaatcattgctatcttgaaatgtaattcattgaatagaagtagctggattgaattgaagtagctggatactatgttgtacttgttgaactcagaataaaaatatacagatgaatccttagcattttatttgggaagcaagaattgcaatttgagatacacagaccaagtggtctttgttatgtctgaataacaaagaggaggttgggagttttattagaaagagaaatcttaagtattgttttgaaagaaagctcactggcactagagaatttctttggagctggcaagatctgattggtgaatgatggtggtaggtaaaaccagttttagagtcatggcaagtcatttcagcagctgctaggtaaaaccggtcttagggttgcagcaggttgtttcagcaccagggtttgtggaaatgttaattcttggatcagttgctctgtgcggtgagtgctttttcccccagccctcaaccctaatttagttggctacaacaagaatgacccaatttgtataatcaactttcacacacctttctcacataatgggcctttaatggctgttgtctgtcttctgtccttttcagtttgaaaatcattctcctagctagagaagactaaagcaagataggagctgagtttctctctcttttttttttaatctattatgattagtttttcttcccaaacaggtttgttcttgccttgtttcttttcctctaggaataggttttaaaagaccctccatgtaatttttcataggccgtgatcattctggattatagtcatcacaccagcattcacacaggctcgggtaactttctcattgaccttgactccctgctccttccgtttcagtccttcccattttaaaagctctttttgttgtcatattgggaaatcattagcattttgagaccaaatgcagatgcttaaaggggatggactacataactctgagaatttgtacctaaagatccaggatacggtgtcattactaagggctttggaggtggaaaatggcattggtttagaggagaaacaatcagtttcagcttcagaaggataattggagataacctgtcaggcagttggaaggtggaactagagaaaaagtgagaaaccataactcggtaagatttagcagtcatgtgaccttgattatttaaccacaaacttagataagatactggggtagcaaagctgagaaatgcaaagagtgaccactgggagataactatggtgaaaaaaatcaggagggagctggagagctaatgaaaacggatctttcagacaaggaggagtgcatctcacatactaggtcaagagcagcaaaccaaaagaagttctaagagcattttgtaattaaacctggtatcactggtgtgtcagctctctgtggcattcacgtagatgtccccccaagccacatctgtaaattcagagtagtatcaactatagacataagtgtaggaatgagcacatttcttcctttctctacttggtttccttagtttgtgactgtgtggcacagagtgctgcaagatctccagccgcaatggagagttcaaaactgaactccaagcagctccaacatagtatccagctaaatttcctaagattctctatatccctaaaggtctggaaaggtaagacagtgtggtatagaacaggagtgccacaccagcaagtggcaggctagaggaagtctcaactctgcctccggttaaagtgtaacctgaacaaatcacttaaccccttctttctttggatgaatctcattcataaaatgaagaaactagatttgtaagggcctttcactccaaaataatcatattattttaatactaagacttaccttctgcctcttattttttttgaagggtagcacactatttgggggagtttaaaaagttgtcatcgtagccgggcgcggtggcttacgcctgtaatcccagcactttgggaggccaaggcgggtggatcacaaggtcaggagatcgagaccatcctggctaacacggtgaaaccccacctctactaaaaatacaaaaaattagccaggcgtggtggcgggcacctgtagtcccagctacttgggaggctgaggcaggagaatggcatgagcctgggaggcagagcttgcggtgagccaagattgtgccattgcactctagcctgggcgactgagagagactccgtctcaaaaaaaaaaaaaaaagttgtcatcttcctttgctttagaaaagggtcctgcgggtatgggccctggattagggaattttaggggtagggagtggatcttgcccaaaattttagtatttaccttttaaactcaggctgcctcatttctgaataaactcaatgtattgtgtaacttagaaaattggttaggaaattttattttttataacttctacagaattatattttaagaaacttagatttcgataggtaaggtgctagatatcagcacttaaccagcaaattctgattctgccacctaatagatgtaaactcaactttgtaaattccaagaaaaaagaaaatttagtgccactaataatggagtagcttaaatcactggttcaaatgatattgcagctctggcatccaggcttctaatgggaaggatgccctttcataggcttttcagcagtgcttttatgtggcagacattaagtgaaaggaagatgatggtaactgaatttatgctttcagaaatatacttaattaaactgaagctaggcaatcagtagaaccagaatctaaacatgtaattcttgcaagatgaagccattgggcaaccagtgagtatccagaggaaagaaatgctggtcttgttttggttttagattagtaaatatagtagtggcaacttgcttctctagaagagtcttgttcaggaggtgcaggaatagattaaggttttaaaaacatctctaccaaattagaaaagtaatattacaaggacgtaggccttcgggctttcatatgagacaccagatttcaaagaaaagaaagatgtaattgagatctgactagggtattctacaaattttttatttgatccagttttctaagacatgttagaagaaaaactaacatggcacatattttccctctgttcccccaaatgaagataacaactaaccaggctggttatcgcactaaaatcctgccatcttttatacctccttgctgcttacattgttgcatgtaaattcctcttttccattgtgctgagcatgagcatgaattttatgtaacaagactgaaatattctccacaacaaacttttgttcatgcttttagatgtaacatttttgcacagggctctgttgcttttttttttttttttttttacagaatccattttccaattaataaataacattatattaagagagtcttctttttaccaattaggtcaaagtcctaaaattttaagactcaaaccccatggtttagagcgaactgattcacaaaccataggtgactttgctacaagaagaaagggtatgtactttagcaccgcatgctgtatggggcattgggaatttattttgtaatgttttttgttttttttctaaaaataaagaagaaccttaaatactactgctgttgtaaataaaactttcctgcacattatttctaaagtgaatgcttcccataatacacaatgagtctacttactctgccattaacaacagcatgttaaatatttgataatatgtgatattcagacttgtccttttgcattattcttttaactttgtagacaacattttatcctttcagtttgtgaactgtttgtgattttctgttgtcttctgtctttatgtatatgtgttctgttctgagacagaataaagaatcatttccatggattaattgtgccattatttaaaaactgacagctaaactgctattagcctttgggtgtcaaaaagtaaaacattaacagttaaagaaatactttcactcagcggaatattctgtatgtttctattttaagaatatagacaagcaaaatggtttcagctcaaattagtaagttaatttggtcttcattatatgtgagttgacaaaatacttatgagcctcaatgcgtatggtcctttaaaatgaccattcattttatagtgtaatggtaactatgccataacatacatggacaaagactataaataaatctcaaagatgaaattttttgttaagagtggcagaatgaaacataactgaaatatttacctaacatgtttaggtagtctcctaaaatatctagtattaaatagtattgtttcagttcttttgctcactctgtaaatttctgaaaaaatctcagtcttgactttaagaaaatggctaagaactctgtggtatatattggtttaattgtctactgcaatatgaggtaaataaagatcacttataaatgaaaattattattagcatttacttaattgtatataatttagcaagagatttgttgcttaaattacactaacaatttgaagtaaaataattatggccttttttcagagcggagtttggatctaaagatacaaatattgtttcgttttgtttgtttccagactgtgcatgaattattttaaaagattcgaacattttttcagtttggggttttaacaaagttgtgtttttaatagtttctatgcatcattttatatatatagttatatactccaatattgaagaaaaggaatgattttacatagatgattaaattttcttattgagtatgaaattggtgaaataatttatgaaataatgaaacatataaagcaaccatagaggaactgggtcacattactctttatctcatttagtttatattcataaaatatgcacttaggcaacatgttgtaatagaggtttaggctttgaggtaacaatcatgaaacatctgatttagcttttaccactaattacttagctatgtaaccttgggcaaatcatgtaacattcatgaacctcatttcacatgtgaaactaggtggtcttaggtttactctggctatcaaatataaatagagttacagagagagaatcttgtttgttttccaaagttctgtatactaaaaatctctttttctctttttcttttcagtcaagccagcgcctttagaaataaaacctttgccagaatgggaagaattacaagccccagttagatctcccatcactaggagttttgctcgagagtaagtcctttgtctaaaatatgtagtttgtatgaataatgtgactatctagaattgttcattatcatggaaaatatctggaatagtggttctcaatggatgatctgaagagccccctttttgggggttctgtgaagtcaaaaccattttcattaatatattaagatgttattttctgtattttttctccttctgagtgtacagtggagttttccagaggctacatgataagtgatgagatcattgtgacacccaatagaaatgtgtatttgtgtattacttacgttttaaaaatatgtctattttcatctctaatatggcaaaattaatagatacaactcatgtaaacaaaaatttcttgggattctcaataatttttaagagtgtaaaaggtttatgaaaccaaaaagtactgaggactactaatcttgaaaatatggtagtctcttgtggagattatttaaccgagacttatttaaatgtatatagggaattgagaggaatttatgaagttacaaacctatgttgaacatatgttcatgtttcgtgtgtgtgtgtgtgtgtatatagtttttaaaaaaatagaaattcttaagtcttccattttatatctgtaactttctacttatcaccaagtcactggcagtggtttttttgttttacacaaaatattttgctgtccaaaatacacttttataatacaattataaatattagttatgtgtttgtacacaaaaattacatcattataaatgtgtacaatgaatgattataaacataagggaatatttctgaaagaatgcagactgtctctcatttttatttggggaataattttagatatttttgtcaaggcttatgtttgtgatgataatttctgtaattagctcttccaggtttcccatgtccccccgaccagattcagtgcatagcacaacttcaagcagtgactcacacgacagtgaagagaattatgttcccatgaacccaaacctgtccagtgaagacccagtatgtaaagttttaacttttccctttctgagcagcccttttcagtcattcaagctagaactgttctgtctataaattttatcctcgtatctttatatacttaagaaaaagcagtaaaagacaacttttaaaaagcttattaaaaataatgtcataaactctaaaaccaataaaaggtgaaagtaaactgtaaatgagttaaaaaaaaaaagttgcctggcacagcagcacaaccctgtagtttcagctatttgggaggctgaggtgggaggatcacttgagtccttgagtccagcagtttgaggctagcctgcacaacatgtcaccctgtctctaattagaaaaaaattaagttttcagttatatgtcatttaagagatacttgattttttatactcttcaagaaaatatacgggcagcattttatgatgcaattctctaaggccatgtcacagcactctaatggtgaaatggtcttataagtaagtaatatacctttagataggtgtaaagattaaagaagacctcttataaacataacatgtttgaggttggctatactaccataaagcatgagaattttctaatggtagtgagcattttgttcctcataaatcaggtagttgccagaaaatacttcaaatgtttaagaatacaaaccaattttaatttttaaaaatattttgctttagcttttccttaagtcagatttaatgtttgctttgttatttgtattttagttgataagtatatccattaggattaagttcccctctgagtaaaagaaaataaatatttgtgactcaagagagaagtttctttctttctcatggaaaagtctagagagagtcaatccaaggctgttgtggcagctctgttccatagagtcttcagggattcagaccttttccagctctccagtctgctttccttgggtgtggcacatatgctcattggacaagatgatgctccagccagcagagtgacattccaactccaggtggaggaaagagagaaaaagaagggtacagcccaactgcctcataaggacagtacctcgaaactgctttatagaaaccattaaccagaacttagcctgtgtggccacacttagacacaaaggagctagaaaacatagacttagatccgaggaacagtgggcccacctaaaaatcccatgcatatgggagaggggagagcaggtattgagggacaatcagaccatatcttccaggataagcaaatacctgatgtcaaaatttagaatgagtaacactttagtggccctatattatttaaaacagccctatttagaggtataaaatataaagcccaattctgtcaatgaattggtttttcatccttaatagactttaggcagaaccagctttcttaaaactatatattgtcaggaaacataattcagtgatatgaaaaacttgattttgtgcttaaattaattaactttaaaatattaccaaatttagccaggcacagtggcatgtgcctgtagtcccagctactcaggaggctgaagcaggaggatctcttgagcctagttcacacctagcctgggcaacatagcgagacctcatctataaaaatttttaaatatcaaatttataaagtattcaaaaataatataatcaatatatcaataatgttttcactgatttttcaaggcagggcaatttttagacacttttgcttttgtattcactatttttcaatttgagtggagttctattattattatttaagttaattagttttcctcagtatagtaagttgactctagtaaaactctaaatcctaaattctcggtcagagtagatattgtcacctattttcaactttgggtagttgagtgaactgttttcttatcgtaaagtaattagagtattttctgaggtactaaagagtgtgtctttttgcccaaaatagtaaatagccataaaaattttggaaagtcccatataataggaaagtttaaaaatgtgatttgtcatgggtgttagatgaagggaaaagatgaaaaagaagagcattacaatcagaaatcaaaggaaatcaaaatacaatttttttttttacacctaatgacagtaagccagaaaggtgcttttacttgccaccaatagaggtgtctaaataaacacaatgtggtgaatttctttttttttttatttggagacagattctctttctgtcacctaggctggaatgcagtagcgcgatctcaactcactgcagcctccacctcctgggtttcaaatgattctcctgactcagcctctcgagtagctgggattacaggtttgcgccaccacacacgactaatttttgtgtttttggtagagacagggtttcatcatgttgcgcaggatggtctcaaactcccgacctcaaatgatctgcctgccttggcttcccagagtgctgggattacaggcgtgagccactgcacctggcctgtgatgaatttatgaagtacttaggtcctatgtattagaaaaaagcaaaaatgacccaggaggacatacctatctaccaagtacaatagaaaagtcaacaatgccaattccatatcctcatgctgccaaatacaaggactcatcatagtccattcaactctcccttagaaaagaatatgagaattatagcaatatttaacaaacttctttaattttggatcaaaaatcatgcattatcaagtgaattctgaatgtgacacctgaaattcaaatgatggtaaaccataactaaaggcatacatactgttatgtgataataacaacaaaaatatgttaaatgattttacataatttttaaagaattttttaaaaatctaggccgggcatagtggctcacacctgtaatcccagcactttaaggaggccgaggcaggcagatcacctgaggtcagtagtgcgagaccagcctggccaacatggataaaccccgtctctattaaaaatacaaaaattagccgggcgtggtggcaggcgcctgtaatcccagttactcgggaggctgaggcaggagaattgcttgagcccaggagacagagattgcagtgagccgagatcaagccactgccctgcagcccaggcaacaaagcaagactccatctcaaaaaaaaaaaaaaaaaaaatctcacactactggtttgttatttaattcaaagaacacttataataccttatagaatcttagagtttctctaaactgttttgggaaaatactgggtgaaaggctagaatacagacaggctgttccagtggagattaaatcaagagcaaatagacttccttgtagacacacaaatgttaaccatacttaaagatggaaaaacattcagttctagtaataacagacataaaataggttaactagccaccctgagaaattctgtttaggagcaacttattggtattatgcatgcaggtcttacaaatttatgcatttcttttatagccttgtaatactgtgaacaattctagatatttctaatcagagaaatggagggtatgggtctttcattgatcacatttgaatatagaacttttcacacactcatggctgattttatgtgacaatgatatatagagtcattcagataaaaaatttcatgatgattccagtttctccatgaattagaaagaagagagggattgctatttatattgaggaccaaaacttgcttatattttttgtgctctacatgttatttttgattttttgattttttaattttttcagacagagtttccctctgttgcccaggctggagtgcagtggtgcgatcttggctcactgcaacctccgcctccgggttcaagcgattatcctgcctcagcctcccaagtagctgggattacaggtgcccaccaccacacctggctagtttttgtagtttttagtagagacggggtttcaccatgttggccaggctggtctcaaactcctgacctcaggtggtccgcccgcctcagcctcccaaagtgctgggattacaggcctgagccaccgcgcctagccattttatatatttttttaatgttttatttgtagtaattgataaatttggtttaaaaaatctgtttcttcaagtaggaatattacatttagttgtacaggttgtttactgaataaacatactgcatacctgattatatgaaattcaggctatgtgctgctcaccaagctgcagtcgcccacagcacagagctgtctcaccccagtgcaagaagcaccttttaataatttgcaaaaaggttccataccagctattagcagccctgctacgaaatgagagaatagtctcaatattttcctagaagtatcctttccctaaggcacagttttttctgtttaacctaagcaaaaagaaatgaagtagcaatataaaaagaatcaacagaaccaccagatgtatgcagttttcaaattgttttattcatcataacatgtataaatttttaactttgttaaatcattatgattttctttaaaagtatgagataatatatgaacattaatatcaacagtgcacaaggatgaaattccctaatgagaaatacacagtcttgcgtatgagaagccaagaacatttctagatggggttaaaaggagtaaggcatggaaacaagtcacttgtttgagcacatgtataatagaaccctgttgtaattagagtggagggaatatatagggacttaggttcatgccagcttttcctttctatttagcattgatcttcaagtgcctatttttcatttttctgcctcaagttttttgttcctgctgtttatcgctgtcatctatcttcctaccttctttccctttttttagagagtagtcctactgtacaaatcatctgaaatggttatttacaaattccagagttgtcttcactctgctctctttaaaatcttagcactatttttgtccaaaattttaattctttttaaacccagaagttagtagtattattgctcttattatataaactatgcttatttacgtttttctgcatgtttagcagcttctttatcatttcttgtatttcaggccttccttaggtagtaattttccttctctcttaaatacgttctttagaatgtatgcctttcaggaaggaaaagatcaggctaaggaaattaggtggtaaaaaatccagatgattgaaacaaaatacacttagccaatggagtcaaacaaattttagtgtgaaagcctttagataaaacgtagaaagtttttttaaaatttaacttgaaagcaaggaatataaagatcctgtaaagcataattgagtacagacataattttaataatgttcaagttgggctatcatagctaagtatctcctgatgtctcaatcttagtgtgaaccaagtttaacttttgaaactacgtttagcttgctctaagctaggctttaatcagttttttaaatattacttattttctttctatcctaaaaggttgtttaactttttaagctatgtcctcttgaaagcaaatatttaggcttccgtagatgttcaacagtacgagtggtatgtctggtgaatgtctgaccgttgattttgttgtctaatactttcagaatctctttggcagtaacagtcttgatggaggaagcagccctatgatcaagcccaaaggagacaaacaggtggaatacttagatctcgacttagattctgggaaatccacaccaccacgtaaggtgagtgacatgtgacatgtctcttctttgtatacagttagttcacacttcaaacctgaagaattatttcctttgggataattttattaagttatgtttaatataaatttagtctggtctgctacttgatgctatctcataaaacaaaaataacatagttatggagactgattattttttcctttctgatggttagaaattttatactttctacttttttagtggttaccattgaaatagttatttaacaaattctttttttttttttttttttttttttttgagacagagtcttgctctgttgcccaggctggagtgcagtagtgtgatcttggctcactgcaacctccgcttcccaggtccaaatgattctcctgcctcagcctcccaaatagctgggattacagatgcgcgccaccactcctggctaatttttgtatttttagtagagacacggtttcaccatgttggccagaatggtcttgaactcctgacctcaagtgatccacccacctcagccctccaaaagtgctgggattacaggcaggagccactgcatctggctgttatttaatgaattctaaagttaaccagtctagtgtctttactctccttaaaatgctcaaattctgtgctatctttgtccaaaattttaatgttgtctttttgttaagcccactaattagacagtattattactgctcttattatataacaatgtttatttacattttcctacatgttgaccagcttctttgtcattccttcctatttctcagaccttccttctgcaataattttccctccacctgaaatataccctttagaagtgcctttagtggaggtcattggtagtaatttttttcagtttttgtataacttaaatgtctttattttgccttcactcttggaaacacagttttcttgagtttacagttcttgatcaacaataattttctctcagcccatggaagatactatcccactactgtcttgcttctattcctatggaaaaattgctgtcagtctaattgtaattcccttgtagataatgtcttttctgactggatgagtttaaggtcatttctgtatctttggtattctacaggttcactacaatacgtctagacatagattcctttttatttatcttgcttagaagtgctgccttctttttggattcatattttttatcaattctgggaaagtctcagtcactattcaaatattgcttttccatttctaaaatgaaattctgtttgggtctttatcaaatatgtctggccaatttactggctcctttttcaatatctgaagtccttggaggtctgaatctgtgtatattgtttctcctatctcacactctctacagtttgtttctttgtgtgttttatatatttttattgcaacctcattttgttgaacatatcttctgaggacctaaatttcttctataaactatttgtatttgcttctgctaggaaccaggaggtgctaccatcctaggaccacatcagttcccttcaggggtccctagcttgatgagatattctcagtttcagcatcacctccaatgcagggcctcctgattgcatttttgagattgacattcatcctaaagccaacaccacgtttaccatttagaagctcaccactccctctacttctcttataccttagacatttcactttctagtgagcgcagcagtgcattgataattttatttaaatatctatatcttgttgaattttaggaatgaaaaggcatcagcttatgtagtttgtcattcttgaagtataacttttccaaaaacatttcttgttagctctcaaagtaaacattgattcatgttctcagaggttgagagacagtcaagcttaagttgacaggagaatcaggttgtctatgttaagatgaaacaggcatctgctgtccctattttttatgaatttcatctgtcatggaagcattagtttgaattctttttttttttttttttttttttttggacgggagtcttgctctgttgcccaggctgcagtgcaggggcacgaacttggctcactgcaannnnnnnnnnnnnnnnnnnnnnnnnnnnnnnnnnnnnnnnnnnnnnnnnnnnnnnnnnnnnnnnnnnnnnnnnnnnnnnnnnnnnnnnnnnnnnnnnnnnnnnnnnnnnnnnnnnnnnnnnnnnnnnnnnnnnnnnnnnnnnnnnnnnnnnnnnnnnnnnnnnnnnnnnnnnnnnnnnnnnnnnnnnnnnnnnnnnnnnnnnnnnnnnnnnnnnnnnnnnnnnnnnnnnnnnnnnnnnnnnnnnnnnnnnnnnnnnnnnnnnnnnnnnnnnnnnnnnnnnnnnnnnnnnnnnnnnnnnnnnnnnnnnnnnnnnnnnnnnnnnnnnnnnnnnnnnnnnnnnnnnnnnnnnnnnnnnnnnnnnnnnnnnnnnnnnnnnnnnnnnnnnnnnnnnnnnnnnnnnnnnnnnnnnnnnnnnnnnnnnnnnnnnnnnnnnnnnnnnnnnnnnnnnnnnnnnnnnnnnnnnnnnnnnnnnnnnnnnnnnnnnnnnnnnnnnnnnnnnnnnnnnnnnnnnnnnnnnnnnnnnnnnnnnnnnnnnnnnnnnnnnnnnnnnnnnnnnnnnnnnnnnnnnnnnnnnnnnnnnnnnnnnnnnnnnnnnnnnnnnnnnnnnnnnnnnnnnnnnnnnnnnnnnnnnnnnnnnnnnnnnnnnnnnnnnnnnnnnncaccactgcactccatcctgggcaacaagagcaaaactccttctcaaaaaaaaaaagtattcacagtggatgtgttttgtgttttaagactgagttgtactcaggaacactcctttatatgttggactttttgttttttctttgtgttttagcaaaagagcagtggctcaggcagcagtgtagcagatgagagagtggattatgttgttgttgaccaacagaagaccttggctctaaagagtacccgggaagcctggacagatgggagacagtccacagaatcagaaacgccagcgaagagtgtgaaatgaaaatattgccttgccatttctgaacaaaagaaaactgaattgtaaagataaatcccttttgaagaatgacttgacacttccactctaggtagatcctcaaatgagtagagttgaagtcaaaggacctttctgacataatcaagcaatttagacttaagtggtgctttgtggtatctgaacaattcataacatgtaaataatgtgggaaaatagtattgtttagctcccagagaaacatttgttccacagttaacacactcgtagtattactgtatttatgcactttttcatctaaaacattgttctgggttttcccaatgtaccttaccataattcctttgggagttcttgttttttgtcacactactttatataacaatactaagtcaactaagctacttttagatttggaaattgctgtttacagtctaacaacattaaaatgagaggtagattcacaagttagctttctacctgaagcttcaggtgataaccattagcttatacttggactcatcatttgttgccttccaaaatgctgaggataatgtatgtactggtgtcaggacctagttctctggttaatgtacatttagtttttaatggtggaactttgttatattttgttaattacagtgtttttggttcattgagtgaagattctgccgggtgggatcttgcacctttgaaagactgaataattacactaccaagtaagcctgcaaatcattgatggcatgcagtgatgatgtgctcttacacttgttaacatgtattaagtgttatttgcaaaaggtagattatgtaaccaatcaggtacgtaccaggcagtgatgtgctaatacactgatcaggtttagacaatgagctttggttgtgttcttgttagtcctaatattggttttcagtttggaattaataaagcagttgacattcactgttagttacagcaacatactgtgatttttaattagatagtaattcagatttattactctatgaaattctgtcttttgacaccatagtgccctttctatgattttttttacttaatattcttcttggccttatatttaattccctatgcaattaatattttatatctgcattttttttaaaaaaatagatgttatataagtgattctcgtatgtagcacctgttgcttttccactgaaagaattacggattttgtactgtgatttatattcactgccccaattcaagaaatattggagccttgctacaatgtgaaatgttatagtcatggactccttccaaccagatttctgaaaacaccagagggatggtataattctgtctcacctataacatggtcctgtgacatagatattaagaccacaagttgtagtgaggctacaattatattcgtctgtcttggctttgcaacataatttagaaagcacgtatagttgttttttaaccaagttacatacaatctcatgtactgatttgagacttataacaatttttggagggggcatagagaaaggagtgcccacagttgaggcatgaccccctccattcagacctctaactgttgcctgagtacacagatgtgccctgatttctggcccattggccatagtactgtgcctaatcaatgtaataggtttattttcccaatcctcaaactaaaaatgttcataacaagatgaattgtagactagtaacatttgatgcttttaaatatttgcttctttttaaacaaaaactaaaacccagaagtgaatttttaggtggatttttaaataaaaaagattgattgagtttggtgtgcaagctgttttataatgaaacaacaaaatgaaatctaaaatcctgaaatgtgcctaaactatcaaaacacacgatacagctaatgtgtaaagatgctaaattctgttacttggaggatgaatatatttaagatttaaaacacaataataaatacatgattaattcaaaaataaaaatctttacagctgcctatcaagggtctaaagcacttaatgaatgtttttagtctaacttatcattaactttttacaagtcaccatatttgaagatctgtagcactctgattttcagaaaatttttcattctgaataatttaaaaatggtgatgtattagaaaggcagtttgctttagaaaactaaatcacattgaacattgtattagagaattaaattaaaagtttcttacagagcagtattttccaaacatttttagcactagaatctttttagatgaaattttatgtataaccccaatacataaagcctgaaaactcaattttatcaatataaatgtattttgggttcacatttatgcttattcattttggctcattactaagcataataagattctgagttatttctgaataacacaaatgtggagttatacatagttgatgaaaccagcagccaatttatagctatgccctgttttatttgtatactatcaagaaaattttgattcacacaaatgtaagcaaaaataataggttttaaacatacatctcaggaaattctttaattagagatagctaaagttattcaaggtctatacaaaaataagttatcctggtagtggaagttaatacataagcagtctccagtgtggtaaagtagggtatgtaacacatcagaatgtgcgtttttattaggttttaaaatatgcacgtataaaaactaaatttgaatcaaacccttttaactcacctccaagaagctagactttggccaggaatgggctaaaaaccactggttaacgatgtgacagttatgatcttggagattggaaatctttcttccacattagagttctttaccttaattccttattctgaaaaattgtaagattttatgaaggtttgaatactgaagcacagttctgctttcaaaaattaaaattcaaacttgaaaaagctgtttaacccatggaagatatcatttagtaagatgtaaaagattttttaaatctacacttcagtttatacatctttatcattatcaatactatataagttactgtgagcattttagagaattccataaaggtactatgagtgtgtctgtatgtgtgtgtatatatagcattgtatttaatcatagactaaatttaatttgatatagaaatactactttacttgtacattaaggtcataatttctgctggactcttttatatttaattaatggggattatagtcttccttcataaatgcatttaaacctgaaattgaacaccagtgtttttctttttctacttatgggaagttgtctgcttccccctttagagaaaacagtatttttatattttgttaaaatattaactactttatgcctacacactatgctgtagatactgatcataattcttgggtgttcacaaacactcctagtgcctcttttttggcccgttgaaagtgttggtattactactttcactacagagcctttggccctctaataatgctgaggtgggctgatccttcccatttctgtcttcgggtcattctggtaggtcttctcctccactgtcaagtaagcaatcaggtccgtgacagggattggacatatgaacaaattaagtggatacacacagtgagaaagatacatgcattctatggtaacaactactgtcaataacatctgatgttacatgcacatttatatatatataattttaaaaactgaactatgagaagccatggtataaatgaatattgtggacatcatggacttgatatgatagaaatcaattgtcagcttgagaaagttgtttttaatctgtctaaatagttcatgcattactacagttaaaaatagtttcatttgtcttctatagacttaattttattccggttcagtataatctctgttaacagagtttcagcaaactgattggtcaaggtattaacatagcttctacttcctttacttaaaaagatgtggttttatgtaagttcttgattactgatgatcatcccaaattttgacaacaaaatcatatgtataaatttatttctcccctcttgttcatcatcttttgtaaaggtcccattgtagatcttttctgctaccaaataaaacttttcaaacaatttggtttcaagaccttaaatagacaagttggatactaagattgtgaactgataaggacatataaatttatatttccagcccttccttagagtctttatctgcatcaaaaacccaattctgccattaactgtgcttcccagtcccacctctatatgtcactcattttctgcaacaaagatctcactaaatcatgttgaaacacaagtcatgatcctctctaagtaaatagaaaaagctccctggaaaaactctgttgccacatgcacgtgccctgttactcctccagccagccagtgctgccagcattttattgtgtaaaagtccaaataaataagggcctgcatgcaacctttatcttcagaaactaggttttatatgtaaaatgtgacttgggaaatgattctgtttattaactggctgggatttttcatttctatgaaagtttcaaacatctccagtactttataaaatcccaacaattgctgtaagtcagcactttggtccactcagcccacccagcccacttgcaactctgactcttcactgaatcatatttgggaagtttgggtagggtgaggctatcttcttcaagattattttctcatatgtctgtctgtcaccttgtaaaccatgagactcctgggtatttgcatgtaacttctttgaggaagttaccaccatctctgatatagacacactttttgagttgcagtttctgttagaattttttggagactaacttgccaattctgtgaatgttattgaatatttaaaaagctgggtctgtaatgggaggcattttattagctgttgtgattgggtaacatgtccccttagatttcctgatttaaaattatacaaaattactatttttgataaaataaaggaacacctacagaaaattaagtttctaagatgtttctatacttcattagaaaagattttattactattacttatggttattggtgattaacacttaatgcgtctcctctgattttgtgttccatgaggtgcttggaacatttggagtgctctgtgcgagggacatacagtgatataggaaatttaaaaattaaaataatacccaaaacccactttatcagatatggtattgtgatggttaatattatgtgtcaacttggtgaggctatggcgcccatgtgtttggtcaaacactagcctagatgttgctgtgaatatattttgtagatgtgattaacatttacaatcagttgattttaagtaaagcagattctcatccataatgttgttgaacctcattcaatcagctaaaggccttaagagcaaaagccaaggtttccaaaagaagtaattcagcctcaagatcataacaaattaatcctaagtttccatcctgctggcctgccttcttgtagattttgaactaaagagtgcatcatcacctcttacctgatccagtttgctggcctaccctaccaacttcagacttgccagttcttacaatcctggagcctttcttaaaactaattctctctgtctctctccatctcccccgtgtgtgtgtgtatatatatatcttcaaaacacatataaaacatgtaagtgttggtatataagaatatatagctatcttacagatatgtgtatcttattggttctgtttttctggagaaccatgactgataaacatactgagtcattaatctgagtgcctctcataccaagcaatgattttgaagtttaatttgcaatgtgttagcagtctgctccaaaagtttcttctgaagccatttactgacagtgaaccatgtttccacttctggccatagctttttatcttctaggaaccattaaatcaacatctccaatgatggaaaatagtattctaagaagaacacagattattggattcttgtcacaaagggtacagaatactattaaggacagaatttcatttgtaacactgggttgtagtcttcacctcttcacccttgtcacatgctatgaccctacacatttatttagttttccctgctttaaatttctaaaacatattacccatgtacatctaaagctgttttttaatcagccttattaaaacaatgtgtttgaaagttgcttattccggtccttagacaaaacagtaattttgaaagtcagactaagaagaaaatactgttgtcccagattttgattctaattgatggtggcttattaataatttagtcatttcactaagctacacatgttgaattattcaaggtgctatgggaaacatgaaagaaatctacctcatctttatctttacaaatatgtgtgaaaaaataatacaggacagtaagttattatttctgaggtaccaactatgagctaccaaagaaaaaacaaagttctgtatttaagaaaagcttcacaaagatggagattgagctggacaatggaggatttgcaagaaggttggcttgctactggtttgtttcatgagaagaggtaaagaaaaagacaaaagcagaatatggagaactatgtactgggtggaggcttatgaaatattgtattagttacggtgtgtaatcagaatgtagtgactttaaaaagtcatctattctcacagtttccatggtcagaaattcaggagtgtcttggccgaacagttctggtccagagtctctactgaaattacagtcaaattacctgagactggagttatctagggctgaaggatctgcctcaggtggtttactcacatggctggcaagttggtgctgcctgttgctgggagcctttgttcctcttcatgtggctgcttcacagagctgcttgagtatctttgaggcatgggggctggcttcccccaaagctagtgatcccagagaccaaacaaatgacctagccttagaggtcacacactgtcatctctgctgtgcagtaatgggttgtacagttcacgccttgattcactgtgggaggagacttgcaagggtatgaataccaggaagtaaggatcactgggagccatctaagatgctagcagtcacaaaggcaaaattaagagttgagagatgaggccaaggatggaagaccttggaaactcaagtgtgttggtaattaaggacttgaaaatgtcagaacaataacccaaagcatggaaagagtaggccacaagaagtcaggaggcagttctaaacctaggtctgtgagtttcaatgtatgttcttataaaactattgaacagttgctgttcaatgtaatacatatgtagtcctcatactacaaatttatcactggtcagttggctagaagtcaagcatcaaggctgcgttggtttgatttcttctgaggtctcttcactggtagatagccatcttctcactgcgtcctcagatggtctttttttctgtgttggcacccctggttctgctctctcattataaagacatcagtcatactagattaggtaaaatgaataattttaccttaattacttctttaacaaccctatctccaaaaacctgacacattctgagcttgtggctatgtttatgtctcatctgcctggctatgttaacttttcccagcaggaaaagatggcacactcaaagaagtaattgaggagagttgaatgaagggactattgtatgggtagggttaagggagccaacaaggaatggttaaaaaccctgagtaatctgcatgtggtggtgcatacctatagtcccagctactcaggaggctgaggcagaaggattgtgtgagtccaggagttgaaagctgcagtgagctatgatcacaccactgcactttagcctcggtgacagagcaaaatgaccccatttcttaaaaagtaaaatcctgagcaacggtaagtgactagcagcagtgagaagccattaccacttctagaactaaggaggcaagtggaggaagctgttacacccagcaagagctgtagctggtggagacagtctgccaacagacactttaatcttaggtaaagggacacacacactatcaaatgctgaccagcagtgaagaaaccagggtacctctctcacagcttgccattggctaaaaccaaccagcccccagaaaggctgggaacccagaatatgtaatacatagaagtcagtctcccagggcacttgggaaggcagagaagggtggaggtacagcaaacagagaaaatcaggtacagcaaacagagaaaatccttaacaatcttcattatctgtcatcatgtcagaccagtaagtcagttaatcttttattgatcatcctcatggacatgaagcatctgtagaagattggcttgctgaacagctgatccaacctctctctggagtaccctcctgtatttaagaagctgtaaagataaaaactacatttcccagacttccttgcaactagggcgctgcttgtaattaacttttcaccagtgatacttgcttaatctcagaaacagttcagtggagagacagaagtctgtgaggcatcaatattaaatctcgcagtttgcatttaggatgtgaagcaatggattcctgctaagcaattcttgcagtggtgtatgcttggagccaatacttgccatggtagattactgtactctgaaggtattacggtttcaaccattggtgcagtggtttcctgaacccagattcccgattgttcccatgtctggcagctccgtagcgttgttctgagaatccttcctaaagagccttcacacctaccagtgagtggtgtgattttaatctgcattaaattatctgtcgtttaaaaattactagcgtggcttaattctcttgagctgacacaggggccaagcttgttgctttctgaattttttttctactttcgcattgtaaaactgtaattaaagacaatttgggagagtaagaagaaaaatgcccacaagccatgttacttccctacctttgcctaaatgtgcagctggactctactttttgcattaactattatcataaatgttttcctaggtgttaagcatctgaattatttttaaagactgcgtaattttccttcaaatattttgaaatactcaatgataatacccaatattgatacagatgtgagtgataggacactatcatctataccactaggagcataaattggtacaactttttaatttttttttgagacggagcttcactcttgtttcccaggctggagtgcagtggtatgatcttggctcactgcaacctccacctcccaagttcaagccattctcctgccttagcctcccaagtagctgagattacaggcatgcaccaacacacctggctaattttgtatttttagtagagatggggtttcaccgtgttggccaggctggtctcaaactcctgacctcaggtgatccacccatctcagcctcccaaagtgctgggattacaggcgtgagccaccacgcccagcctcaactttttcaaagagcagtttatacatacgattttaaagtcttgaaactgtagttagcctttaacctagcaattacatttcaagcaattagcattaacgaattcatcacaaaaaattgtctccaacgaattaggggcttatccaacaatggagaggaaattaagttgtacatacacatgtatatagcaatttataatatagaataataatttttaaaaccatgtccttccaacaggggagacctcaaaaaggaaaggtagatcaagtatttgagagatccagtctcacttcatccttgttttaattacggtaccttcacatttttgtttgtacattggaagaaaagtataaggttttatttgaaaaataggttttactacttgaaaaaaatgttagctcttgcaataaaagaatatttgatgtcatgaatggttctttaagaccattggtgtaaaaattaagactatgtaacctgggtataatcctgtttttgcatataactaacaggattaaaacagcaggatatcactacagatactgcagacattaaaatgataacgagaaagattatggacaaccttaggccaatatatttgaaaactatataaaatgaacaaatcactagaaaagacaactttctaaaactgaaaagaaatttgaatagttctatatcagctaaaatgagttttataattaaaaacctttttccaaagaaaactctgagcttagataacatctcgatgggttctatcaaacatttaagaaacaaatagttttaccaaacatttaagaaataacaaataaatcctggtaaatcaagaatgcaaggttcttatcaataaaataaaggggaattaatcacatgatcatctcaattgatgcagaaaattgttaaacttcaacatctattcatgatttaaagaacaactcttagcaacattaaataaaagggaagtttatgaaaaaaagaatatttaaacatttatcagcaaacctgacacttaatgctgaaatattgacaactttctctttgagacctggaacaagacaaatatgtccattatcaccacttctattcagtattgtactgaaggacatatgcagggaaaattacaagaatttgagaaaataaataaaacagctgttatccacagataatatgattgtgtatgtagaaagctgaaataaatctacaggtaaaaggttgttagaaataaggttaacatacaaaaatcaatttttgtatgtaacaatttgaatatgaaattttgatagcatcaaaagaattgatcagaaacacatttaaaatagtatgtgcaaaacctctgctataaaatattaagaataaagtcaaaatagaggaataaaaaagagtatatgatgtgcatgggtggggtaattcaatgctgtgaagatatcagttttccccaaagttgatctttaagttcaatgcaatgtcattcaaaatcccaggtttttgttttgtttttgtttttgttttaaatgaacctgagaagctgattcttaagtgtctatggaagtgcaaaagaccaagaatagccaaaatattcttgaaaaataacaatgtggaagaagtactctataagatttacaacttattataaagatgtagcaagtaacattggtaccaggatgaaaaagtatgccaaaggaactcaaaagagaacacagaaacagaaccacgtatatatggacactgatttatgacacagtagctgcagagcagtggaaaacaatgtggaccacatggatatccatataaataaaagaagaaaattgacctgtgactcatattataagcaagtatcaattcctagtgaactgtagatataattgtgaaaggcaaaacaataacaaagcttatacaggataattttatcatgattcaaaaaaaaaagaaggtttcttaaagaggaccagaaaggaattaaccaaaaaataaaagattgacaaattggattatatcaaagttaagaacatctactcatcaatagatactgttacaataaccaaaagcaaaacacacagtgggaaaattaacaaatgattcataaactgattatatttagaactcctatagatcagtaagaaaaatgcagtaactcaaaaaggggcaggagacgagaatgcaaacaaaacccacgttatactactgcacatccactcaaatgattaaaaagactgccaatacgaagcattgctaagaatgtgtaaattaatctcatgcagtgctagtaggggtcaaattaacacaaccactttgaaagactgtcattatttacaaaatgtacaaaatatttacaaaatttagacatatgaataccttatggcctaaaaatcatactaccgagttatacccaactgaaatgcatgcacatgtgtagcaagagacagacatgagaatgttcatggtagtattatttacaaaaacaaaatgagcaaaataacccaaatgcccatcaacagtagaaaggagaagtgaattatgttttatttcaataattcagatatttaaatgaataaactacagccactcataagcatatagatgaatttctcaagtacaagattgactaaaagaagctagatacaaaagaacacaacatatgattttacccacataaagtgcaaaaacagtgcaaaaactaaaccatggtgtttaatgcatgcttaggtggcaaaactataaaggaagtaaggagttaatttcctaaagtcgaggatagtaattacactggatgggaaggacaggtaaaaagttggaaggggcgcatgtggtttttggagtgctggcaatgttctatttattcacttgggtggtggttgcctaggtatgttcactttgtaataattaatcgtgctgcatatttttgttttgtgaactctgtgtgttttatttcataatgaaaagattaaaaataaactattgccaaaaatgtttgacctgaatctaacatccagaagacagagggacaatttaattgacaccaccaggaaacaatcagacaaaatatagaatattccatgtaagacaacttgcccggtctctacaaaaagatgaagtcttttttttttttaagtgagggactgctccagaacaaaagagacaaacgcataacaaccacaatacttcatgggggaagaaagtgatttaagacattttaggcacaaatagcacatttaaaatatgaactagataataaatggtattaaagaattactcataatttttctggtgtaataatattatgacaatgtagttgaatgtccttcattatatagatggctgctgaattatttagggttaaaacatctgaaaataatattgaaaaaaatgcacacacatatacatatatgtacagagataaacagagcaaaataattggcatgtgcctgcagtcccatctacttgggaggctgagatggaaggattgcttgagctcagatgtttgagaccagcctgggcaacaaagtgagactctgtctcttaaaaagataagatgtaagttaaaatcaaaatattaataattattccatcaaggtggtaaatgtttattgtactattctttcaaattttctattgaagagttttatagtagaaagttgaaaagtagttgaacaattcaattatctttcttatacctggaaaaaatgagaggaagagaaaaaaaaggaagggaggaaggcaggcaagaagccaggcgttcaggaaggaagaaaggaaggaaagaatacacatataatacatgggaaaatccttggattcattagaagaataagtagacaaaataagccattactatgaattggcaatgattttaaaaaattgatttgaataatatctctatatgttgcatatgttctccacatcccttttctcaatttcacatgttaatctaaataacatcacagaataatttttataaggtattatttctttctatacaatgtttcttaataaataatacaatcatagggttcaaaacataaaaagcattaaatagtttacagaaaaaagtacccctctctcctatgcccatgttatatgtccttccagagatatgctgtacactcataagcaaactcatatatactagttcatatgtattaagggacttttaaatttaggttctccttgaccttactttggtttttttctcctaagattacatatgcacattgccagcagcgatgaacaagttgttatttggtggacagcaccctcttgtgcatgaactgaattttcaagggaaatctgacaaaaagtagaataaattacatgaatattctctcatggaattacaattgtaaaagttccttgaagccaagtggtctgcccccttgccttcaataagtcagttaagaccagccctaaagtattagtcattttcttttaaatcttcagaagaaggtgtccccacacttgccttaccaatttcacatatattttgtgctttttggtctccaaaacattctcacatccataatattttgtttgattacaacctgagttattgtcccctttttccactgaaatatattaataattcacataccaaataactcgcccatttaaactatacagctgatttttagtgtatttgcagccttttaccaccatcaccacaattaatttagaacgttttcatcagcccgaaaacaaattccgtacccattggcaatcactaccaattaccccaatcctgcctcagccctaggctatcatgaacctattttctggttctgtagatttcccttttctagacatttaataaaaatagaacccatacaatatgtggcatggccgtttatgactagcttctttcctttagcatactgtacacaaggttcatgtatgctgtagcatgtatcagtactgctttcctttttattgctgaataatattccattttacggctgtgctacattttaattatccattcatcagttgatggacatttggattgtttccactttcaaggtagtatgaataaatgctgctatagacatttggcctcctttttattttcttttattttttaaagatattttaggcagaaatagcacatttaaaatatgaactccatctcactctgtcacccaggctggagtgcaatggcacgatcttggctcactgcaacctccacctcccaagttcaagccattcttctgcctcagcctcccaagtagctaggattacaagcgtgtgccaccacgcctggctaattttgtatttttagttaagagatggggtttcaccatgttggtcaggctggtcatgaactcctgacctcagatgatccacccacctcggcctcccaaagtactgggattacaggcgtgagccaccgtgcccggcctctttttttttttttttttttttttttgagacagagtcttgctctgtcgcccaggctgggatacagtggcacaatctcggctcactgcagcctccacttccaggttcaagtaattctcctgccccagcctcccaagtagctgggactacaggcacgagccaccacgcccagctaatttttgtatttgtagcagagacagggttttgccatgttgtctaggctagtctggaactcctggcctcaggtgatccgcccaccccagcctcccaaagtgttgggattacaagcatgagccaccgcacccggccgccctcctttttcagttgcaaagatggaagtctcctgagccgagataatcagaggctcacaaaaaggggacttggctttgcccatagccaccaccattaccaaaagcactccaactacagtggcatcccccacaactccaattcac

SEQ ID NO: 2138 - DNA, 8335 bp, Homo sapiens
ctcccaggagccaagccgccaagcgcctcgttcctctgctgctccccgccctcttcggcggccgcgagagcggacccaccctccggcttgacctgcgacctccctgcgcccgccgctcagaaacgccccgcgcttcgctgccaaccctgcggctccctctgtgacccgggaccagccccgcgcccgctgcccgtaggcggctcgcggcttcccctttcctcggcgttcaccgagcgccgcgaagtgacccaccctcccccgaggagagggaaggaggatcgctccgggcgcatcgaaaccgagggcgggtgggcgggcgagcgggcaccgcgcggggcattgtgtgtgtgtgtgtgtgtgtgtgtgtgtgtgtgtgagcagcgctgtgtctgtttcggaaagcgctctggggaggtcttgtccctagggggcggagcgcaaaggacagaagctccggcaccgagtcggggcagagtcccgctgagtccgagcgctgctgaggcagctggcgagacggcacgtctggaggcgaggcgggcgcactgaaaggaggccggcgcgcccgcggccccggctcgcgttctgttcaggttcgtgggcctgcagaggagagactcgaactcgtggaacccgcgcaccgtggagtctgtccgcccagtccgtccggggtgcgcgaccaggagagctaggttctcgccactgcgcgctcggcaggcgtcggctgtgtcgggagcgcgcccgccgcccctcagctgcccggcccggagcccgagacgcgcgcaccatgagcggtggtgaagtggtctgctccggatggctccgcaagtcccccccggagaaaaagttgaagcgttatgcatggaagaggagatggttcgtgttacgcagtggccgtttaactggagatccagatgttttggaatattacaaaaatgatcatgccaagaagcctattcgtattattgatttaaatttatgtcaacaagtagatgctggattgacatttaacaaaaaagagtttgaaaacagctacatttttgatatcaacactattgaccggattttctacttggtagcagacagcgaggaggagatgaataagtgggttcgttgtatttgtgacatctgtgggtttaatccaacagaagaagatcctgtgaagccacctggcagctctttacaagcaccagctgatttacctttagctataaatacagcaccaccatccacccaggcagattcatcctctgctactctacctcctccatatcagctaatcaatgttccaccacacctggaaactcttggcattcaggaggatcctcaagactacctgttgctcatcaactgtcaaagcaagaagcccgaacccaccagaacgcatgctgattctgcaaaatccacctcttctgaaacagactgcaatgataacgtcccttctcataaaaatcctgcttcctcccagagcaaacatggaatgaatggcttttttcagcagcaaatgatatacgactctccaccttcacgtgccccatctgcttcagttgactccagcctttataacctgcccaggagttattcccatgatgttttaccaaaggtgtctccatcaagtactgaagcagatggagaactctatgtttttaataccccatctgggacatcgagtgtagagactcaaatgaggcatgtatctattagttatgacattcctccaacacctggtaatacttatcagattccacgaacatttccagaaggaaccttgggacagacatcaaagctagacactattccagatattcctccacctcggccaccgaaaccacatccagctcatgaccgatctcctgtggaaacgtgtagtatcccacgcaccgcctcagacactgacagtagttactgtatccctacagcagggatgtcgccttcacgtagtaataccatttccactgtggatttaaacaaattgcgaaaagatgctagttctcaagactgctatgatattccacgagcatttccaagtgatagatctagttcacttgaaggcttccataaccactttaaagtcaaaaatgtgttgacagtgggaagtgtttcaagtgaagaactggatgaaaattacgtcccaatgaatcccaattcaccaccacgacaacattccagcagttttacagaaccaattcaggaagcaaattatgtgccaatgactccaggaacatttgatttttcctcatttggaatgcaagttcctcctcctgctcatatgggcttcaggtccagcccaaaaacccctcccagaaggccagttcctgttgcagactgtgaaccaccccccgtggataggaacctcaagccagacagaaaaggtcaaagtcctaaaattttaagactcaaaccccatggtttagagcgaactgattcacaaaccataggtgactttgctacaagaagaaaggtcaagccagcgcctttagaaataaaacctttgccagaatgggaagaattacaagccccagttagatctcccatcactaggagttttgctcgagactcttccaggtttcccatgtccccccgaccagattcagtgcatagcacaacttcaagcagtgactcacacgacagtgaagagaattatgttcccatgaacccaaacctgtccagtgaagacccaaatctctttggcagtaacagtcttgatggaggaagcagccctatgatcaagcccaaaggagacaaacaggtggaatacttagatctcgacttagattctgggaaatccacaccaccacgtaagcaaaagagcagtggctcaggcagcagtgtagcagatgagagagtggattatgttgttgttgaccaacagaagaccttggctctaaagagtacccgggaagcctggacagatgggagacagtccacagaatcagaaacgccagcgaagagtgtgaaatgaaaatattgccttgccatttctgaacaaaagaaaactgaattgtaaagataaatcccttttgaagaatgacttgacacttccactctaggtagatcctcaaatgagtagagttgaagtcaaaggacctttctgacataatcaagcaatttagacttaagtggtgctttgtggtatctgaacaattcataacatgtaaataatgtgggaaaatagtattgtttagctcccagagaaacatttgttccacagttaacacactcgtagtattactgtatttatgcactttttcatctaaaacattgttctgggttttcccaatgtaccttaccataattcctttgggagttcttgttttttgtcacactactttatataacaatactaagtcaactaagctacttttagatttggaaattgctgtttacagtctaacaacattaaaatgagaggtagattcacaagttagctttctacctgaagcttcaggtgataaccattagcttatacttggactcatcatttgttgccttccaaaatgctgaggataatgtatgtactggtgtcaggacctagttctctggttaatgtacatttagtttttaatggtggaactttgttatattttgttaattacagtgtttttggttcattgagtgaagattctgccgggtgggatcttgcacctttgaaagactgaataattacactaccaagtaagcctgcaaatcattgatggcatgcagtgatgatgtgctcttacacttgttaacatgtattaagtgttatttgcaaaaggtagattatgtaaccaatcaggtacgtaccaggcagtgatgtgctaatacactgatcaggtttagacaatgagctttggttgtgttcttgttagtcctaatattggttttcagtttggaattaataaagcagttgacattcactgttagttacagcaacatactgtgatttttaattagatagtaattcagatttattactctatgaaattctgtcttttgacaccatagtgccctttctatgattttttttacttaatattcttcttggccttatatttaattccctatgcaattaatattttatatctgcattttttttaaaaaaatagatgttatataagtgattctcgtatgtagcacctgttgcttttccactgaaagaattacggattttgtactgtgatttatattcactgccccaattcaagaaatattggagccttgctacaatgtgaaatgttatagtcatggactccttccaaccagatttctgaaaacaccagagggatggtataattctgtctcacctataacatggtcctgtgacatagatattaagaccacaagttgtagtgaggctacaattatattcgtctgtcttggctttgcaacataatttagaaagcacgtatagttgttttttaaccaagttacatacaatctcatgtactgatttgagacttataacaatttttggagggggcatagagaaaggagtgcccacagttgaggcatgaccccctccattcagacctctaactgttgcctgagtacacagatgtgccctgatttctggcccattggccatagtactgtgcctaatcaatgtaataggtttattttcccaatcctcaaactaaaaatgttcataacaagatgaattgtagactagtaacatttgatgcttttaaatatttgcttctttttaaacaaaaactaaaacccagaagtgaatttttaggtggatttttaaataaaaaagattgattgagtttggtgtgcaagctgttttataatgaaacaacaaaatgaaatctaaaatcctgaaatgtgcctaaactatcaaaacacacgatacagctaatgtgtaaagatgctaaattctgttacttggaggatgaatatatttaagatttaaaacacaataataaatacatgattaattcaaaaataaaaatctttacagctgcctatcaagggtctaaagcacttaatgaatgtttttagtctaacttatcattaactttttacaagtcaccatatttgaagatctgtagcactctgattttcagaaaatttttcattctgaataatttaaaaatggtgatgtattagaaaggcagtttgctttagaaaactaaatcacattgaacattgtattagagaattaaattaaaagtttcttacagagcagtattttccaaacatttttagcactagaatctttttagatgaaattttatgtataaccccaatacataaagcctgaaaactcaattttatcaatataaatgtattttgggttcacatttatgcttattcattttggctcattactaagcataataagattctgagttatttctgaataacacaaatgtggagttatacatagttgatgaaaccagcagccaatttatagctatgccctgttttatttgtatactatcaagaaaattttgattcacacaaatgtaagcaaaaataataggttttaaacatacatctcaggaaattctttaattagagatagctaaagttattcaaggtctatacaaaaataagttatcctggtagtggaagttaatacataagcagtctccagtgtggtaaagtagggtatgtaacacatcagaatgtgcgtttttattaggttttaaaatatgcacgtataaaaactaaatttgaatcaaacccttttaactcacctccaagaagctagactttggccaggaatgggctaaaaaccactggttaacgatgtgacagttatgatcttggagattggaaatctttcttccacattagagttctttaccttaattccttattctgaaaaattgtaagattttatgaaggtttgaatactgaagcacagttctgctttcaaaaattaaaattcaaacttgaaaaagctgtttaacccatggaagatatcatttagtaagatgtaaaagattttttaaatctacacttcagtttatacatctttatcattatcaatactatataagttactgtgagcattttagagaattccataaaggtactatgagtgtgtctgtatgtgtgtgtatatatagcattgtatttaatcatagactaaatttaatttgatatagaaatactactttacttgtacattaaggtcataatttctgctggactcttttatatttaattaatggggattatagtcttccttcataaatgcatttaaacctgaaattgaacaccagtgtttttctttttctacttatgggaagttgtctgcttccccctttagagaaaacagtatttttatattttgttaaaatattaactactttatgcctacacactatgctgtagatactgatcataattcttgggtgttcacaaacactcctagtgcctcttttttggcccgttgaaagtgttggtattactactttcactacagagcctttggccctctaataatgctgaggtgggctgatccttcccatttctgtcttcgggtcattctggtaggtcttctcctccactgtcaagtaagcaatcaggtccgtgacagggattggacatatgaacaaattaagtggatacacacagtgagaaagatacatgcattctatggtaacaactactgtcaataacatctgatgttacatgcacatttatatatatataattttaaaaactgaactatgagaagccatggtataaatgaatattgtggacatcatggacttgatatgatagaaatcaattgtcagcttgagaaagttgtttttaatctgtctaaatagttcatgcattactacagttaaaaatagtttcatttgtcttctatagacttaattttattccggttcagtataatctctgttaacagagtttcagcaaactgattggtcaaggtattaacatagcttctacttcctttacttaaaaagatgtggttttatgtaagttcttgattactgatgatcatcccaaattttgacaacaaaatcatatgtataaatttatttctcccctcttgttcatcatcttttgtaaaggtcccattgtagatcttttctgctaccaaataaaacttttcaaacaatttggtttcaagaccttaaatagacaagttggatactaagattgtgaactgataaggacatataaatttatatttccagcccttccttagagtctttatctgcatcaaaaacccaattctgccattaactgtgcttcccagtcccacctctatatgtcactcattttctgcaacaaagatctcactaaatcatgttgaaacacaagtcatgatcctctctaagtaaatagaaaaagctccctggaaaaactctgttgccacatgcacgtgccctgttactcctccagccagccagtgctgccagcattttattgtgtaaaagtccaaataaataagggcctgcatgcaacctttatcttcagaaactaggttttatatgtaaaatgtgacttgggaaatgattctgtttattaactggctgggatttttcatttctatgaaagtttcaaacatctccagtactttataaaatcccaacaattgctgtaagtcagcactttggtccactcagcccacccagcccacttgcaactctgactcttcactgaatcatatttgggaagtttgggtagggtgaggctatcttcttcaagattattttctcatatgtctgtctgtcaccttgtaaaccatgagactcctgggtatttgcatgtaacttctttgaggaagttaccaccatctctgatatagacacactttttgagttgcagtttctgttagaattttttggagactaacttgccaattctgtgaatgttattgaatatttaaaaagctgggtctgtaatgggaggcattttattagctgttgtgattgggtaacatgtccccttagatttcctgatttaaaattatacaaaattactatttttgataaaataaaggaacacctacagaaaattaagtttctaagatgtttctatacttcattagaaaagattttattactattacttatggttattggtgattaacacttaatgcgtctcctctgattttgtgttccatgaggtgcttggaacatttggagtgctctgtgcgagggacatacagtgatataggaaatttaaaaattaaaataatacccaaaacccactttatcagatatggtattgtgatggttaatattatgtgtcaacttggtgaggctatggcgcccatgtgtttggtcaaacactagcctagatgttgctgtgaatatattttgtagatgtgattaacatttacaatcagttgattttaagtaaagcagattctcatcca

SEQ ID NO: 2139 - protein, 724 aa, Homo sapiens
MSGGEVVCSGWLRKSPPEKKLKRYAWKRRWFVLRSGRLTGDPDVLEYYKNDHAKKPIRIIDLNLCQQVDAGLTFNKKEFENSYIFDINTIDRIFYLVADSEEEMNKWVRCICDICGFNPTEEDPVKPPGSSLQAPADLPLAINTAPPSTQADSSSATLPPPYQLINVPPHLETLGIQEDPQDYLLLINCQSKKPEPTRTHADSAKSTSSETDCNDNVPSHKNPASSQSKHGMNGFFQQQMIYDSPPSRAPSASVDSSLYNLPRSYSHDVLPKVSPSSTEADGELYVFNTPSGTSSVETQMRHVSISYDIPPTPGNTYQIPRTFPEGTLGQTSKLDTIPDIPPPRPPKPHPAHDRSPVETCSIPRTASDTDSSYCIPTAGMSPSRSNTISTVDLNKLRKDASSQDCYDIPRAFPSDRSSSLEGFHNHFKVKNVLTVGSVSSEELDENYVPMNPNSPPRQHSSSFTEPIQEANYVPMTPGTFDFSSFGMQVPPPAHMGFRSSPKTPPRRPVPVADCEPPPVDRNLKPDRKGQSPKILRLKPHGLERTDSQTIGDFATRRKVKPAPLEIKPLPEWEELQAPVRSPITRSFARDSSRFPMSPRPDSVHSTTSSSDSHDSEENYVPMNPNLSSEDPNLFGSNSLDGGSSPMIKPKGDKQVEYLDLDLDSGKSTPPRKQKSSGSGSSVADERVDYVVVDQQKTLALKSTREAWTDGRQSTESETPAKSVK

SEQ ID NO: 2140 - DNA, 8245 bp, Homo sapiens
ctcccaggagccaagccgccaagcgcctcgttcctctgctgctccccgccctcttcggcggccgcgagagcggacccaccctccggcttgacctgcgacctccctgcgcccgccgctcagaaacgccccgcgcttcgctgccaaccctgcggctccctctgtgacccgggaccagccccgcgcccgctgcccgtaggcggctcgcggcttcccctttcctcggcgttcaccgagcgccgcgaagtgacccaccctcccccgaggagagggaaggaggatcgctccgggcgcatcgaaaccgagggcgggtgggcgggcgagcgggcaccgcgcggggcattgtgtgtgtgtgtgtgtgtgtgtgtgtgtgtgtgtgagcagcgctgtgtctgtttcggaaagcgctctggggaggtcttgtccctagggggcggagcgcaaaggacagaagctccggcaccgagtcggggcagagtcccgctgagtccgagcgctgctgaggcagctggcgagacggcacgtctggaggcgaggcgggcgcactgaaaggaggccggcgcgcccgcggccccggctcgcgttctgttcaggttcgtgggcctgcagaggagagactcgaactcgtggaacccgcgcaccgtggagtctgtccgcccagtccgtccggggtgcgcgaccaggagagctaggttctcgccactgcgcgctcggcaggcgtcggctgtgtcgggagcgcgcccgccgcccctcagctgcccggcccggagcccgagacgcgcgcaccatgagcggtggtgaagtggtctgctccggatggctccgcaagtcccccccggagaaaaagttgaagcgttatgcatggaagaggagatggttcgtgttacgcagtggccgtttaactggagatccagatgttttggaatattacaaaaatgatcatgccaagaagcctattcgtattattgatttaaatttatgtcaacaagtagatgctggattgacatttaacaaaaaagagtttgaaaacagctacatttttgatatcaacactattgaccggattttctacttggtagcagacagcgaggaggagatgaataagtgggttcgttgtatttgtgacatctgtgggtttaatccaacagaagaagatcctgtgaagccacctggcagctctttacaagcaccagctgatttacctttagctataaatacagcaccaccatccacccaggcagattcatcctctgctactctacctcctccatatcagctaatcaatgttccaccacacctggaaactcttggcattcaggaggatcctcaagactacctgttgctcatcaactgtcaaagcaagaagcccgaacccaccagaacgcatgctgattctgcaaaatccacctcttctgaaacagactgcaatgataacgtcccttctcataaaaatcctgcttcctcccagagcaaacatggaatgaatggcttttttcagcagcaaatgatatacgactctccaccttcacgtgccccatctgcttcagttgactccagcctttataacctgcccaggagttattcccatgatgttttaccaaaggtgtctccatcaagtactgaagcagatggagaactctatgtttttaataccccatctgggacatcgagtgtagagactcaaatgaggcatgtatctattagttatgacattcctccaacacctggtaatacttatcagattccacgaacatttccagaaggaaccttgggacagacatcaaagctagacactattccagatattcctccacctcggccaccgaaaccacatccagctcatgaccgatctcctgtggaaacgtgtagtatcccacgcaccgcctcagacactgacagtagttactgtatccctacagcagggatgtcgccttcacgtagtaataccatttccactgtggatttaaacaaattgcgaaaagatgctagttctcaagactgctatgatattccacgagcatttccaagtgatagatctagttcacttgaaggcttccataaccactttaaagtcaaaaatgtgttgacagtgggaagtgtttcaagtgaagaactggatgaaaattacgtcccaatgaatcccaattcaccaccacgacaacattccagcagttttacagaaccaattcaggaagcaaattatgtgccaatgactccaggaacatttgatttttcctcatttggaatgcaagttcctcctcctgctcatatgggcttcaggtccagcccaaaaacccctcccagaaggccagttcctgttgcagactgtgaaccaccccccgtggataggaacctcaagccagacagaaaagtcaagccagcgcctttagaaataaaacctttgccagaatgggaagaattacaagccccagttagatctcccatcactaggagttttgctcgagactcttccaggtttcccatgtccccccgaccagattcagtgcatagcacaacttcaagcagtgactcacacgacagtgaagagaattatgttcccatgaacccaaacctgtccagtgaagacccaaatctctttggcagtaacagtcttgatggaggaagcagccctatgatcaagcccaaaggagacaaacaggtggaatacttagatctcgacttagattctgggaaatccacaccaccacgtaagcaaaagagcagtggctcaggcagcagtgtagcagatgagagagtggattatgttgttgttgaccaacagaagaccttggctctaaagagtacccgggaagcctggacagatgggagacagtccacagaatcagaaacgccagcgaagagtgtgaaatgaaaatattgccttgccatttctgaacaaaagaaaactgaattgtaaagataaatcccttttgaagaatgacttgacacttccactctaggtagatcctcaaatgagtagagttgaagtcaaaggacctttctgacataatcaagcaatttagacttaagtggtgctttgtggtatctgaacaattcataacatgtaaataatgtgggaaaatagtattgtttagctcccagagaaacatttgttccacagttaacacactcgtagtattactgtatttatgcactttttcatctaaaacattgttctgggttttcccaatgtaccttaccataattcctttgggagttcttgttttttgtcacactactttatataacaatactaagtcaactaagctacttttagatttggaaattgctgtttacagtctaacaacattaaaatgagaggtagattcacaagttagctttctacctgaagcttcaggtgataaccattagcttatacttggactcatcatttgttgccttccaaaatgctgaggataatgtatgtactggtgtcaggacctagttctctggttaatgtacatttagtttttaatggtggaactttgttatattttgttaattacagtgtttttggttcattgagtgaagattctgccgggtgggatcttgcacctttgaaagactgaataattacactaccaagtaagcctgcaaatcattgatggcatgcagtgatgatgtgctcttacacttgttaacatgtattaagtgttatttgcaaaaggtagattatgtaaccaatcaggtacgtaccaggcagtgatgtgctaatacactgatcaggtttagacaatgagctttggttgtgttcttgttagtcctaatattggttttcagtttggaattaataaagcagttgacattcactgttagttacagcaacatactgtgatttttaattagatagtaattcagatttattactctatgaaattctgtcttttgacaccatagtgccctttctatgattttttttacttaatattcttcttggccttatatttaattccctatgcaattaatattttatatctgcattttttttaaaaaaatagatgttatataagtgattctcgtatgtagcacctgttgcttttccactgaaagaattacggattttgtactgtgatttatattcactgccccaattcaagaaatattggagccttgctacaatgtgaaatgttatagtcatggactccttccaaccagatttctgaaaacaccagagggatggtataattctgtctcacctataacatggtcctgtgacatagatattaagaccacaagttgtagtgaggctacaattatattcgtctgtcttggctttgcaacataatttagaaagcacgtatagttgttttttaaccaagttacatacaatctcatgtactgatttgagacttataacaatttttggagggggcatagagaaaggagtgcccacagttgaggcatgaccccctccattcagacctctaactgttgcctgagtacacagatgtgccctgatttctggcccattggccatagtactgtgcctaatcaatgtaataggtttattttcccaatcctcaaactaaaaatgttcataacaagatgaattgtagactagtaacatttgatgcttttaaatatttgcttctttttaaacaaaaactaaaacccagaagtgaatttttaggtggatttttaaataaaaaagattgattgagtttggtgtgcaagctgttttataatgaaacaacaaaatgaaatctaaaatcctgaaatgtgcctaaactatcaaaacacacgatacagctaatgtgtaaagatgctaaattctgttacttggaggatgaatatatttaagatttaaaacacaataataaatacatgattaattcaaaaataaaaatctttacagctgcctatcaagggtctaaagcacttaatgaatgtttttagtctaacttatcattaactttttacaagtcaccatatttgaagatctgtagcactctgattttcagaaaatttttcattctgaataatttaaaaatggtgatgtattagaaaggcagtttgctttagaaaactaaatcacattgaacattgtattagagaattaaattaaaagtttcttacagagcagtattttccaaacatttttagcactagaatctttttagatgaaattttatgtataaccccaatacataaagcctgaaaactcaattttatcaatataaatgtattttgggttcacatttatgcttattcattttggctcattactaagcataataagattctgagttatttctgaataacacaaatgtggagttatacatagttgatgaaaccagcagccaatttatagctatgccctgttttatttgtatactatcaagaaaattttgattcacacaaatgtaagcaaaaataataggttttaaacatacatctcaggaaattctttaattagagatagctaaagttattcaaggtctatacaaaaataagttatcctggtagtggaagttaatacataagcagtctccagtgtggtaaagtagggtatgtaacacatcagaatgtgcgtttttattaggttttaaaatatgcacgtataaaaactaaatttgaatcaaacccttttaactcacctccaagaagctagactttggccaggaatgggctaaaaaccactggttaacgatgtgacagttatgatcttggagattggaaatctttcttccacattagagttctttaccttaattccttattctgaaaaattgtaagattttatgaaggtttgaatactgaagcacagttctgctttcaaaaattaaaattcaaacttgaaaaagctgtttaacccatggaagatatcatttagtaagatgtaaaagattttttaaatctacacttcagtttatacatctttatcattatcaatactatataagttactgtgagcattttagagaattccataaaggtactatgagtgtgtctgtatgtgtgtgtatatatagcattgtatttaatcatagactaaatttaatttgatatagaaatactactttacttgtacattaaggtcataatttctgctggactcttttatatttaattaatggggattatagtcttccttcataaatgcatttaaacctgaaattgaacaccagtgtttttctttttctacttatgggaagttgtctgcttccccctttagagaaaacagtatttttatattttgttaaaatattaactactttatgcctacacactatgctgtagatactgatcataattcttgggtgttcacaaacactcctagtgcctcttttttggcccgttgaaagtgttggtattactactttcactacagagcctttggccctctaataatgctgaggtgggctgatccttcccatttctgtcttcgggtcattctggtaggtcttctcctccactgtcaagtaagcaatcaggtccgtgacagggattggacatatgaacaaattaagtggatacacacagtgagaaagatacatgcattctatggtaacaactactgtcaataacatctgatgttacatgcacatttatatatatataattttaaaaactgaactatgagaagccatggtataaatgaatattgtggacatcatggacttgatatgatagaaatcaattgtcagcttgagaaagttgtttttaatctgtctaaatagttcatgcattactacagttaaaaatagtttcatttgtcttctatagacttaattttattccggttcagtataatctctgttaacagagtttcagcaaactgattggtcaaggtattaacatagcttctacttcctttacttaaaaagatgtggttttatgtaagttcttgattactgatgatcatcccaaattttgacaacaaaatcatatgtataaatttatttctcccctcttgttcatcatcttttgtaaaggtcccattgtagatcttttctgctaccaaataaaacttttcaaacaatttggtttcaagaccttaaatagacaagttggatactaagattgtgaactgataaggacatataaatttatatttccagcccttccttagagtctttatctgcatcaaaaacccaattctgccattaactgtgcttcccagtcccacctctatatgtcactcattttctgcaacaaagatctcactaaatcatgttgaaacacaagtcatgatcctctctaagtaaatagaaaaagctccctggaaaaactctgttgccacatgcacgtgccctgttactcctccagccagccagtgctgccagcattttattgtgtaaaagtccaaataaataagggcctgcatgcaacctttatcttcagaaactaggttttatatgtaaaatgtgacttgggaaatgattctgtttattaactggctgggatttttcatttctatgaaagtttcaaacatctccagtactttataaaatcccaacaattgctgtaagtcagcactttggtccactcagcccacccagcccacttgcaactctgactcttcactgaatcatatttgggaagtttgggtagggtgaggctatcttcttcaagattattttctcatatgtctgtctgtcaccttgtaaaccatgagactcctgggtatttgcatgtaacttctttgaggaagttaccaccatctctgatatagacacactttttgagttgcagtttctgttagaattttttggagactaacttgccaattctgtgaatgttattgaatatttaaaaagctgggtctgtaatgggaggcattttattagctgttgtgattgggtaacatgtccccttagatttcctgatttaaaattatacaaaattactatttttgataaaataaaggaacacctacagaaaattaagtttctaagatgtttctatacttcattagaaaagattttattactattacttatggttattggtgattaacacttaatgcgtctcctctgattttgtgttccatgaggtgcttggaacatttggagtgctctgtgcgagggacatacagtgatataggaaatttaaaaattaaaataatacccaaaacccactttatcagatatggtattgtgatggttaatattatgtgtcaacttggtgaggctatggcgcccatgtgtttggtcaaacactagcctagatgttgctgtgaatatattttgtagatgtgattaacatttacaatcagttgattttaagtaaagcagattctcatcca

SEQ ID NO: 2141 - protein, 694 aa, Homo sapiens
MSGGEVVCSGWLRKSPPEKKLKRYAWKRRWFVLRSGRLTGDPDVLEYYKNDHAKKPIRIIDLNLCQQVDAGLTFNKKEFENSYIFDINTIDRIFYLVADSEEEMNKWVRCICDICGFNPTEEDPVKPPGSSLQAPADLPLAINTAPPSTQADSSSATLPPPYQLINVPPHLETLGIQEDPQDYLLLINCQSKKPEPTRTHADSAKSTSSETDCNDNVPSHKNPASSQSKHGMNGFFQQQMIYDSPPSRAPSASVDSSLYNLPRSYSHDVLPKVSPSSTEADGELYVFNTPSGTSSVETQMRHVSISYDIPPTPGNTYQIPRTFPEGTLGQTSKLDTIPDIPPPRPPKPHPAHDRSPVETCSIPRTASDTDSSYCIPTAGMSPSRSNTISTVDLNKLRKDASSQDCYDIPRAFPSDRSSSLEGFHNHFKVKNVLTVGSVSSEELDENYVPMNPNSPPRQHSSSFTEPIQEANYVPMTPGTFDFSSFGMQVPPPAHMGFRSSPKTPPRRPVPVADCEPPPVDRNLKPDRKVKPAPLEIKPLPEWEELQAPVRSPITRSFARDSSRFPMSPRPDSVHSTTSSSDSHDSEENYVPMNPNLSSEDPNLFGSNSLDGGSSPMIKPKGDKQVEYLDLDLDSGKSTPPRKQKSSGSGSSVADERVDYVVVDQQKTLALKSTREAWTDGRQSTESETPAKSVK

SEQ ID NO: 2142 - DNA, 23734 bp, Mus musculus
  misc_feature (1)...(23734): n = A, C, G or T/U
gggtgcccagactcagtggatatatctaaaacacaacccccatgtcttagttagggtttttaatgctgtgagcagacaccatcactatagccactcttataaagaaaaacatttaattggggctggcttagagtgtcagagatgtagaccatcatcatcatggtgggaagtatggccaaatgcaggcagacatggcactggaggagctgagagttctacatcaggatccacaggcagccacaggaaactgtgagccatactgggtgtagttggagcatatgagaacctcaaagcctgcccccacagtgacacactttctccaacaaggctacacctactccaacaaggacacacctcatagtagtacaactccttatgggccaatcattctaacacatgagtctatgggggccattcctactaaaaccaccgcaccccacatagacagagggaatgaaaaggttgtaggagtcagagggacaggaagtctgttgtgtggttgtatatcctgggtaatgacaaggaagctatacctgtaatacctcaataatatggctgactaaataagacctgaataatgagatcaccaaaagacatgctaatgtgcctgcctttaaacaaagaaccacagggaactaaaaactgcagagaggggaagaatcagtcttccccaggaatgagacccctaattgattatccactactaaatggtcagccctgaaatcatatgtataaacagtaaacggtctcagctgggtggttttttttttttaaacacaaaatctcttttgtttttttaaagatttatttatttacatatatgagtacacaattgctttcttcagacacaccagaagagggcattggattccattacagagggtggggagccacaatgtggttgctgggatttgaactcaggaccctagaagaacagtcagtgctcttaacctctgagccatctctccagccctcagctgtttcttcagaaaaataccactgcaacaggagggcccaagatgaggaggctgcagcttccactgaggctcagcagctgtcttaggagctgctgtagaggttgaagatgtggctgtggagataaagccaaaaccaagaagtagatccctgtcaccaagctgggccacctggacatgattaattccctggaggagatcaacctgttctccctgtccattaaggaatccaagattattggctttttcctgggggcatccctaaagaaagaggccctagtgatccagccagtgcaaaagcagacttgaagctggacagcagaccaggctcaaggcttttgtcactattggggactataatggtcatgtgggccttggtgttaagtgctccaagcaggtcgtcactgctattcgaggggccatcgtctgggccaagctttccatcgttcctgtacaggcaggctactgggggaacaagattggcaagccccacactgttccctgcaaggtgataggccgctgtggttcagtgctggtgtgccttatccctgccccccagaggcactggcattatctctgctcctgtgcccaagaagctactgataatggctggcattgatgacggctgcacatcagccaggggctacactgccaccatcggcaactttgtcaaggtcacctttgatgccacctccaagacctgcagctacctgaccccccgacctctggaaagagactgtgtttgccaagtctccttaccaggaattcactgaccatcttgtgaaaatccacaccagcctgctcagagaaacaaagctccggctgtggctaccaaataagggtttttaatacatgaaaaataaagtgaatcaaagtctgttttaaaaaaaaaaataatggttgggttatggtggaacagccttgaattccagtactccagaagcaaagacaggcagatctctgagtttgagaccagcctggtctgtagagcaagatccaggacagccagggctacacagagaagccctgccttacaaccccgcccccaaatacatgactcagctgtttataacaattaaaggaaaagagacaacgaatgtgagaagtgatagaagccatgcaggcctagaagggggagaggtaagatggaaaatgaggtaatactttacattgtttttagactttatgtcgatacataatttagctgcatgcatgtatgtgtaccacatatgagcctactggattctctgaatctgtggttattagtgactatgagctgccatatggatgctggggatcaagactcggccctttgcaaggacaagcgctcttaacacttgagccctctctccaacccctatacttcaataatctaaaaaagaaaaaaagaggtggacaactcctgaagaacaacactgaggctgaccacacacacacacacacacatacacacacacacacacacacagtgcacacacacatacacacacacacacacatgcacacatgcacacacacacacatgcacacacacacacatacacacacacacacacacacacacatacacacacacacacatacacacacacacacacatacacacacacacatacacacacacacacacatacacacacacacatgcacacatgcacacacacacacacacacatgcacacacacacatacacacacacacatacacacacacacacatacacacacacacatacacacacacacatacacacacacacacatacacacacacacacacacatacacacacacatacacacacacacacacatacacacacacacacacacacacatacacatacatacacacacacacatacacacacacatacacacacacacacatacacacacacacacatacacacacacacatacacacacacacacacacatacacacacacacacacacacacatacacacacacacacatacacacatgcacacacacacatacacaagctgggtgtggtggcacaggcctataattccaagtactcataaggctgaaacagggaaatcgtaagttcatggccaacctgggctatgtaaccagaaagaaagggaaaacacgtacccacacccacagagagagagagagcgagcacatccgtggtagagtgcctccagggaaggctctgggattgatcacaagcttgagctgaggggacaagctcagtagagggcgcaaacagaaactagaccattctctcaacttttcctgttgacagatctcgcaggttaagaagtccttaaaggtagttcctgatgacagggagcagggcggggccaaaatgtgtcattgtttataagccatcaacaggaaaacactgagagctgaactgaatcctctctgagaacagtgcatgcttttaaccgctgagccacctctccagcccctagcctaggctttttgagggagaatccccaggtgaggcccaggtcatccttgaacttacagtcctccagcctcagcctcttaagttgctaggttggcaggggtgaggctctgtctctggcttcctgctttagatgaatgttgctggggttggaaattccttgtctgcctcaccttgcctccagtaaccaggccatctgcagacaatagagccagttccaaatggagactggttgcttttcaaacctcccactgtgctgcagccctgtcagggcctgtctgtagagacagcttccaactgtgtcctcgcacacctaacacagtggctgattcattgctgatgatggtggggtgtacccattatgacttgaaggtttgattctaagcagcctgccgagatgaaggctcactgactcctctaccctgagctttgggagaactcccagttatttggatggctacgatctgacttccataagacacacatcacagagccatgagtatttcccacacagggtaaagtaggtagcgatcgtcttggatgccttgcattgtttcagagcatgaaccaatcctgactcagagctgtctgagggaagttatgaagccaggcttagatatgctagggctgtttagtcactttctgctgtgccaagatctctaatagagtctccagccccacccatcccatagacctgcaattccaagtggtcgtgaaactgaaacataaaatcataaattcaaggccagtctgggctttgtagacatagcaagaaaaaaaaagaaaggaaggaaggaaggaaggaaggaaggaaggannnnnnnnnnnnnnnnnnnnnnnnnnnnnnnnnnnnnnnnnnnnnnnnnnnnnnnnnnnnnnnnnnnnnnnnnnnnnnnnnnnnnnnnnnnnnnnnnnnnnnnnnnnnnnnnnnnnnnnnnnnnnnnnnnnnnnnnnnnnnnnnnnnnnnnnnnnnnnnnnnnnnnnnnnnnnnnnnnnnnnnnnnnnnnnnnnnnnnnnnnnnnnnnnnnnnnnnnnnnnnnnnnnnnnnnnnnnnnnnnnnnnnnnnnnnnnnnnnnnnnnnnnnnnnnnnnnnnnnnnnnnnnnnnnnnnnnnnnnnnnnnnnnnnnnnnnnnnnnnnnnnnnnnnnnnnnnnnnnnnnnnnnnnnnnnnnnnnnnnnnnnnnnnnnnnnnnnnnnnnnnnnnnnnnnnnnnnnnnnnnnnnnnnnnnnnnnnnnnnnnnnnnnnnnnnnnnnnnnnnnnnnnnnnnnnnnnnnnnnnnnnnnnnnnnnnnnnnnnnnnnnnnnnnnnnnnnnnnnnnnnnnnnnnnnnnnnnnnnnnnnnnnnnnnnnnnnnnnnnnnnnnnnnnnnnnnnnnnnnnnnnnnnnnnnnnnnnnnnnnnnnnnnnnnnnnnnnnnnnnnnnnnnnnnnnnnnnnnnnnnnnnnnnnnnnnnnnnnnnnnnnnnnnnnnnnnnnnnnnnnnnnnnnnnnnnnnnnnnnnnnnnnnnnnnnnnnnnnnnnnnnnnnnnnnnnnnnnnnnnnnnnnnnnnnnnnnnnnnnnnnnnnnnnnnnnnnnnnnnnnnnnnnnnnnnnnnnnnnnnnnnnnnnnnnnnnnnnnnnnnnnnnnnnnnnnnnnnnnnnnnnnnnnnnnnnnnnnnnnnnnnnnnnnnnnnnnnnnnnnnnnnnnnnnnnnnnnnnnnnnnnnnnnnnnnnnnnnnnnnnnnnnnnnnnnnnnnnnnnnnnnnnnnnnnnnnnnnnnnnnnnnnnnnnnnnnnnnnnnnnnnnnnnnnnnnnnnnnnnnnnnnnnnnnnnnnnnnnnnnnnnnnnnnnnnnnnnnnnnnnnnnnnnnnnnnnnnnnnnnnnnnnnnnnnnnnnnnnnnnnngaagggaaggaagggaaggaagggaaggaaggaaggaaggaaggaaggaagggagggaaggaagggaaggaagggaaggaagggaaggaagggaggaaggaaggaaggaaggaaggaaggaaggaaggaaggaaggaaggaaggaaggaaggaaagaaagaaagaaggaaggaaagcacacacaagccaggcagtggtggtatagacctttgatccctgcactcaggaggttgagacaagtggatctttgagtttgaggccagcctggtctacagagtaagttacaggacagctagggctacacagagaaaccctgtctagaaaaacaaaaccaaaagaaacaaaaaattaaaaataaaaatcattacaaatgagagcatttctttcatcctcacagagtgccctgtgccccgtctgtggcaggcagctccccagtccctagcagctgctgatgtgctcacatactttcacgttttctagaaggtcacagaaaatagaaccacacagccttttgagcctgccttctttcactgacataatgcgttttgaagtacaccggcattgtagcctgtattcatggctttttttttctttttatggcctaaaaatattccattgtgtggatggatcacagcttgtattcaaccactgaaggacactcaagtttcaagctgttggtaattattcataaagcctcagtaaaaataaaatcctatgttacataaacatgtttatttaactttttaaaattatactcactttgtgtgcgtgtgggaggggtgcacatgccatgtggctaagagaccaacttgagggagtcagtgccccgtttctgctgtgtgggccccaggtcctcaggtttggtgggaagagtcctcacatgctttcctgacagccactgaacatagggtatgttttgatttttgttttccttttaatttttttttttgacacaatgttttgttatgaatcccagcctaccctggaattagagaacctcctgcttcggcctcttttgctctgaaatcaaagctacatgccaccattcccaacttgaacatgagtttttattgcacatcggcttttcctgggaatggcagtggtggccaaagggctgccatgttttttgatgatctttgatggacagataggagacaagagggcaagagcaaaactcttcaaggctttaccaccatttgggccacatcacacagcagctgaatgcactcagtaagggctcagtacccaaactcttcgatgctttactgtgtggcctgggtaaaatgggagcatccaacttctgagagctttagctgtaaaatgggagtgtctgaaggcaattgttacaattaggtaagttaatgggagcctggggtgtggctcagcagtagagccagcacaacgggggccaggccatgggtgccaatccatcatgggctatttgactctgccttacctgggcagctgaacttgtcgaccaggcaggacttgaactcagagatccatctggattaaaggcttgtgccaacacgcctgcctccagcttgatttttgagacagtctcccactgggcacactaattagactaagctggatgttatagtatttggggaagggttcttcaccccttctgctgccaagtaactgtttctacgcccactctacggttttagctcctgagtaaaggacacagagacctggtatttttattaacaagttgcaagcactaagctgggcgggttctgagctgttctacccctctaggccgcctatttcccaccctgagtcttgccctggctacctctgctccaagtgtgttctcatggtgacctatcatcataggaactgcaacacactgtctgggcataaaatcaacatctgaatacacagtgcacaaaccatcccccaacagctggctgtctggtcagcctacccagggctggaattccaggtgcctgtcgccatgcctggctttgtttttccattttgtttctgtagattctggtaatcaaacttgggtgctttccatacagagacctctccttggccctacttttatatttagagacagggtctcaaattttacgtgggctggccttgaatgtgcagcccaggcaggcctcaagctcccagcaactctcttgcctcggactcccaagttctgggatttcagttatgaacaactggcatggctaattctggcattcaagactatttggcatttgctttgggccagcccactcacatctttgaggggacctcctgtacttaatgcctaatgatagaagatgttaacctagccccatatacaaaataacttcctgtgtaattgaacaagcccatgcataactgctaaatgtaacagcttctccaggctcagagcccagcatccaatgagcttccccatggtggtggtggggggggggtatcatagagtctttggctttattttggtgtctgttgtttgctgtcagacatggaacccaggatccttgcctatgtgacccacaccctgcgtcactgagaagcacttgcttggtttttgttgttgtttgtttaaagacagggtttctctgtatagccctagatgccctgaaattctgtagaccaggctggccttgaactcatagatccacctgtctctgactacagagtgctgggattaaaggcacacgacactacctgtttgcttttgaacaactgatactttctgataagcatggtggcaggtactcgtcagctcaacactaaggagactgaggcaggagaatctggagttcaaagccagcttgggctacataatgaacccaagaccactgtgggttaaagaatgagaatgtgcctaaaataatgataataataataataataacagtgataattaaaataccccatcatgaatcagcctcagccttacgtagaaagctggcatttccagttgtgagattatccccaaacagaaagatttcccttgcataacgtagtggacaagccagcacccgccccccgcccccccccccatggcaagaaaccttagtaaagcccagataggcccagccagaggcacacctgcacttctccgttaaaatcaccccgtaaatgtgaagcactcccatgtcctgtgctttccttgcctctgggacagctcttctgttcagtatgtactttgatttctagtcacctattttgaaggcaggctggcctcacagggagtcctcgtgcagcagcatccccgcactagactacaggaatatgccactgtgcccaggctgtcgctatctctgtatctttttgtttgtttgtttgtttttgttttttttcgagacagggtttctctgtatagccctggctgtcctggaactcactttgtagaccaggctggcctcgaactcagaaatccgcctgtctctgcctcccaagtgctgggattaaaggcatgcgccaccactgccagctcactatctctgtctctgtacctttaaagacactttctctacaagtgttccctagctccaaatccatggggaggcggggggcagggctcaactggttcggttttcatggggtcagtacagttaggaaaatcaaaacacatacaccacacacagctataccattaacggaaggctaaagtcatttttctcaggggtgcctagggcaagggttatctgactctcctcctacagagcttccagaaagggaatgtcaacagttgtccactaaacaagatgattaatcatctctttcaagaacaccctttgtcccttgtctttaacaaatgcagaataatgtcaacttcaccatattccacgaccattccctttgtacagatgaccacactgagaccagaaaagctactctaccaacccaaggtcacacagccagaaagtgctaggatgaaagtcagtctttcatgcactttcaggcagtcccattccctgcaagaaccaccaatgactattccagcttctctatgccttccaatatctgaagctctctcctcttcctcactcagctctgtccttgaccgccatcatcccagacttacaaaaccaaaagcaaaaagctatactatatcaaagtatttggaaatatttacgaagcacccagtggatctttaaaaaaatcacgcagccctggtggtaaactcagacggcaaaggaagtgacaagtatcagaacgccaagaggcgagctaaacccagtaggaattagtaggaagtaagataaaccggagaggcagcccgactgcagcaagcccaaggcagaccagtctcacctcgctttacagtaacggccttacgggaaaaaccaagggctacgggcagaagagggcggggtgcctatttttatccctgggttagagcaggaaagcttagaggtacttgtcaggtagctaccacaagtcacgcagcagaacctcccagccggcgataacctggggaaagggtgcggcctttcggagaggcccgtctctgtagccccgcccctcttcgcgcctccacctgtccgcagagagagagagggttgcgattggctggatccgctacggaggcggaaccccagcagccggcgcgcgcgcccgaggaaggcgttgaccagagtagagagggaaggggcgtggccccgcgcggaaagccgttggcagccgggtcccaccccggatgtgctgcgtcacggagcgggccgcagcgattggccggtgtcgtgcggcgcatcgggaggggcggaaggttctggagggctggcgggatctggaagcttccgccggacgggtatatagagtccgggacggggcagcagcggagccggaggcggcgacagctgggcggcggtggccatgggcaaggactactatcagacgctgggcctggcccgcggcgcgtccgacgacgagatcaagcgagcctaccgccgccaggcgctgcgctaccacccggacaagaacaaggagcccggcgctgaggagaagttcaaggagatcgccgaggcctacgacgtgctcagcgacccgcgcaagcgcgagattttcgaccgctatggagaggaaggtacgtgtgcgcgcggccggggtgacccgccgtttgacaggcggggaaaccgaggcactcggagcctctccaagacctcggccggggacaggcattccggggatctagcggcggcgccgcctccttcaccctctgatccgcggcctcagacaggaggaggagctctgggcgcgccgctggcacagaagcttctagcacgtctgccgcagcccctcccggtcggtcgcctgcacagcgccggaatggtgcagatggagggcggcggtcgcgatgggaatgaaaattgcccgagtattgattctctttcctagccgcaagctcagtgttcgctcacccagggttgagcctttttggtaacagtgcgtaggagcttctctgtaagatggtaacagcatagctgggaggatggagcagtcacgtaaacctggtcgcaccgagatctagaggccttactaccgaatatgttgtcaggaagtaaaatggagtagtgtgtttcttgctcctattgccattgggagttaaaagacttgagattcgtccttgactaacaagctttttaatatatacataaaatccctcccgctatagttcctgtggcctttttactaagagcaaaacttgttgagcagagtgcgggggctcacacctccacatgggaaaccgaattaggaacgctgtgaatttgcttcaaatcagagctacagggtaataagctcctgtttccaaaggaaccggatgttgtgacaatcccccctctggagtatttgagtcaggaggattgccttgaggctactctggacgaaagtttgtgtgttacgtggcattgacagtaatacatgcaaaaggaacaaaatgtgaccatttatttgagacaggacctcactgttgctggaactttgtttttcaatttatttgagcgtgtgcctccgtgtatatgtgtataccattcacatgcttctagagaagagggcattaaaggtcccggaactagagttagaccatggtctgctgctatgtaggtgttggaaattgaacttggtccttctgccagatgagccagtgctctgagccatttctccagcacctcatggtggagctctggcttgtctggaacttgcagagatcagtctgcacttgtcttgagagtgctggggttctgagctctttgtttcaggggttttatgttttataagtgtgttgaagtgttgggggtggagggaggtggggctgactctccagcagtaaccctgacttgtggttttggtttccaggcctgaagggtggtagccccagtggaggaagcagtggtggtgctaatggtacctctttcagctacacattccacggagacccccatgccatgtttgctgagttcttcggtggcagaaacccctttgataccttttttgggcagcgcaacggggaagaaggcatggacattgatgacacattctctagctttccaatgggtatgggtggcttcaccaacatgaactttggacgttcccgcccttctcaagagcccacccggaagaagcaagatcctccagtcacccatgaccttcgggtctcccttgaagagatctacagcggctgtaccaagaagatgaaaatctcccacaagcggctgaaccctgatggaaagagcattcgaaatgaagataagatcctgaccatcgaagtgaagaggggctggaaagaagggaccaaaatcacctttcccaaggaaggggaccagacctcgaacaacattccagcagacatcgtctttgttttaaaggacaagccacacaatatcttcaagagagatggttctgatgtcatctatccagccaggattagccttcgggaggtaaggtgctaggtgggtggaggagtcataaaaagagatggctgctgtgagaataatgggttgtggggttgggggtgctctgctgctaacagcatgggggggctttggagtggggtgtcagcgggcctggtctggtagacctgacccttctccggacggtctggaggagtgaagctcctaagccagccactgcctgacactgtccttttgcttccctaggctctctgtggttgcactgtgaatgtccctactctggacggcaggaccatccctgttgtattcaaagatgtcatcaggcctggtatgcggcggaaagtccctggagaaggcctccctctccccaaaacacctgagaaacgtggagaccttgttatcgagtttgaagtgatcttcccggaaaggattcccgtctcatccagaaccatcctggagcaggttcttcccatatagccacctgcactcctcaaggactgagccaggggctttcagcgctgcagatctccagaccgttccactggttgcatatgcgggagggcccagggagggcttttgctctgccgaatgttttccacagaatatattacaatctttcaaagtcgcgcactagactacagtggtttttcgagcgataggcaggcggtgggaacagcagccctcctggaatggacccaccctctgcaccccagctcctgcccaagggtgtgaggcaggcctgcaactggactcttgccctctgttgtccttagtctggctgtcatgtgacagtggtccgccatctcagttgccagaccctgtgcactagtcagtctccactgtgtgggaggttcttgttttatctgtatttgtcccatgccttgttcctcctccccagaagagtcctgtcttgtcttggccatctcaaattgagaccaattccctaggactgccaggccagcatcacaagcaatacctggttgcaggaccacagggccagcctccttccaggttctggggcctggccagccaggagatcccctggacctctggctccattgacatcagatggctggcttacagtcacagtacttgctggtccagaggtagaccttggccacacctggcacttctcagaggcacaggtgattttgtgtgtgtgtgtgtgtgtgtgtgtgtgtgtgtgtgtgtgtgtgtgtgtgtaatggactctgaactctagaaggatacaatccttttggattttgcacagtcctagatctaatcccttttgataaaagggtctttgcttctgatgaaaggagcactgtggaacgtatgtaaatatgtttttataattccattggaagctggtgtgcactcagacgaaagcagtccctgtcaactactgtccagggctgtgatgggatcagacctgggcgtgaaagtatctgttctttggagctagcctggtgttctgaccattcaactcattgtaagttgccactaccaacacaagaccaaagtgtgtgacttgtcattatgcagtgtgacagcattaaagactgatgctaaacctcaggggagcagtccttcgactctgtttgagggctttgctggggggaggagcggcatggttactgttctcattctcaaaagaaagctctgtttcccttcctgggacacattggtttcccgttcaggaccccagcatcactgtggtgacggttggggtaggagcccgccctgagtgccttttctaccttgcaagctcctggccacatctggggacctagtaaccaccagggctgaggattacagtgccatctgcctgaattcccccttccaacttggtagggtaggctaggctagcccagagctaggatgcacctgcccagagttggctgccctggggagaaacccacttccttttcccacttgataggggtgtctgagaacttctttgaagaggtaggttgattatagagcaatgtgttggttttgtctctgtgttctggtggttctggttgtggagcccagggttttgttctccagctgactacagctaccagccatgctgcagtctgctcaacagtaaaacctgtctaagaaattgtaacatagaaagataatcccagagccagatgtgacctctgtaaactcaacactgggaaggctaagcccagaagtagttggaaatctgtctaagctatggtagagtattgatccagcctatgtaagtctacctaagagctgctttcccttaccaccaaaggcaactctggaatgtttgttgttgtttaataaaatagttcctctagtctccctaacacatacgaggtgctcggctaccacacatgctatggctgcagactgatctcaagaataatacagtcacttttagagagatgagctggtgtgcgatcagctagggaggttgtatgcccacaaagaactatgtccacagttctagaatcccacaaatcccatggacagcaacctcgggagtagggtcttttactgttctcaggggccagggcatgtcaggccctgggatatagcctggcacctgacaccttgacatggcctgagcctgaggtacccttccttgtgcggcatggcaccaaagagatagaactctgccttttgtgcagtccagagagagcctgtgagggctcagtagttcacagcgcttgctctcctgtaagacctgggttcagttctcacccccacatggtagtttgcctccatctctaactccaggtctaggaaatccagcacttgacttgaggcatcaagcatgcacgtgatgtgcataatgcactcaggcaaaacactcctatataaatacatctagaaacttttaccaagactgtgcctgtgcttatttatataagtgcagcgtctaagttttcggtttcacttcttggcttctattagcacaatttaaaacttagaaagagctcacagagagaagctcgccctcccgaatgttgttttctgagggcttctgcgtttctcatgctccgtctcatttcctgggtttctatcttattagttctaactgggatagtagtggagttgtaactttggcttccaggtttgaatcccagcttgaccttttcaagctgtatgatcttagataaggaaactaactttgttatgccagtgcttcaactgtgaaatgagtgtagttaatgtagaaccccatcctggacattttgtcttacacttaaccagtaaattgcttgcaaggtcaagactagcctatgaaacttagaaattagacactgtctcaaaaagtaaaaaaaaaaaaaaagaaagaaagaaacctgcatggcacatgcctttaatcctggtacttagaaggcacaggcagatctctttgagttccagggcagccaaagtgtcataaagacatatcaagactctttccaggaaaacaaaaacaaaaagcactaatttcttgtagaaaacccaagtttggtatccagaactcatgtcaagtggactacagggaatccaaggcccttttctgacctccggggacccctatactcaacatgaatgtagacacacagcatagtcatgtgtcacactacacgggccaggcgtagtgtagcacgcagcttctatctcaggacttggcaggaccaagtggatctatgaggtcagcagcctacataactacatagctacatagtgagacacacacacacagagggaaaggcatagtgtatagcttcacaatagagagcttgcccagcattgcaaaggacccaagttccattctttgtactgcaaaaatatacaaatatataactacctctcttctaggtttgtatggatttccagatacgtaaatggcacacacagaccacacaggtactgacacagaacagcattgtatgtcagctccacccacacacctaccttcccaaagacagacaagtctatcctggatcagtgctgtggctgagtcccaggaaccaaacccaggtgaattgctgacctcagtagagctcggctgaagcagcagccaaagctaaagtaggcctaccccttgttacctctagccactattggacaagcaccagaaaataggtaccaaggccaggcagccccagttttgaatcccagctccagcaccctgattctgtgtgttgttggaaaagtaattccacctctctggtcctctcagtaatctttgagaaatagaagaactggctgggtgtgatgtcaaatcccagaaatccagcactctggaagctgggctgcatacccattttcaggtcagccagtgctacacagtgagactcttcatatctactgtcattcctggaatagagtaaatcattgaggctaaagactcagtggttaggtcttactttatgcaggcaaattcatatgcaatgttatataaaatataacatttatgcattatgattcatatcatgataaattatagcagcctttccctatagtgttgtgatactctttttttttaatttattttcatgcatgtgagtactgtagctatacagatggttgtgagccttcatgtggttgttgggaattgtacttatgacctttgttgctctggttggcccactcgctgtggcacaaagatttatttattattatacataagtacactgtagctgtcttcagacacaccataaaagggtgtcagatctcattacaggtggttgtgagccactatgtggttgctgggatttgaactcaggacttttggaagagcagtcggtgctcttaacctgctgagccatctctccagcccactgtgatacccttaagaatgatttcaaaaaggcagtgagatgctggagagatggctcagtggttaaaagcactggctgctcttgtggaggactggggtttcattctcagcacccacctggtagcttacaaccagttgtaactctagttacagatctaatctaactgctggccccagtgggcatcaggcatgcacaaggtgcacagacatacagataggaaagcaaaacacccaacgttagtaataattttatggccccaaagaaagagaccatcattccaactgaactggacaagaagaattcctgatcaatagggttagctcagaagagacaggaagtgctcttggttggttggttggtttgtttgtttgttgttttttctaactctgatggtggctgcatatgttccccattggctggggtccaacctcacagtcttatcctattggcttgtttgaaaagaactggctcactggaaatgaaggaggaagggggaagaggtccttgctccagcctgtctaattcctggagtgcagcagggagcctttgtataaacaaaggtttgggctgttgttgttgttgtttggttggttggttggtttttttggtggtggggggggaggagattaaaacatccccagttcccatgtaaatgtgaggtgggtgtggccggctgcctgtaatcccagtggatacccagaggaaactgactgccgtagagtagctaaaattgggaactgtggagagtggtggagaaagcaaggtcatcttggggcctccacacagacacacaggtaacatatacccacacattcaaacacataacacccactacacacatgaaaaagaaaaaccttacagaattacaattttcagcattcagaggccgaggctcaaaggatgccagttcaaggacaccctaaggtacataatggtgccatcttgtgagatatccaccagtggagacccccagacacaagttcaagggaacagggagtctttattagctgactggcaactacactgggtgtctgggacccttaagcaatctcaaacttttctgaaggtgagcttttaaacacaaaaaccacatcctaggaggacacaactcagttaccaagaacagttacccaggagtgtcactacagaagccaaaagcaaggttagtacacatagggactttcccagaattatggactctgataaattaggtctttgttctcatttgggcaggtggtgctgcctgcatgctgggttccatggcctgaatggcacttccattatggagtcagtcgtgctaaggtctgggtgcctgttagaatgccaaacaaaacacaacccaactcttcggtcaaattgatgtcaatgagagctgtgtgcttggcacacaagatgtcatggctatggtttccagcatggcagaaagagacaaaggagctattcctgaggctaaacaagactattttctaacctcactattcctaaagactgctgctgggtgacagtcatatggtaagcactcatccatttaataggtactttttgaacatccaccgagttccaactgtgatcttagtgataggaacagtggtgaagcaaactgtcaaatgctcttgtctttggtctggtgagctggtccaaccttaaaagtgctgtgaccatgcctgccaacatgagtttgacacccagatcctgcctggtagaggggaactaatttcctcatgttgtccactggcctccactagcatggcatggcatgcccagacacacaataagtaaatatttaaagagatttatttttaatctctgggttttgactggcccctggcccagtggtaactgcctaacacatagaacaccctgggttctatacccatcaaggaaaagaaggaagacggggaaacgggagggaagagagagaaaaactccatcctagcatgcgagagaccccaggctctacccccgaactacaataaataaattagtaatctctatccttgtggagctgatggtcaagtgggagtagatgagagcaggaacacatccaatgctgtgtcagatatcaacgagagctaaggtgctggaggagcagtaggtggagagtgttgggtacatttttaaataacagcaagtgctttgccaagaaggtggcatttaagcaaagaccagagtggtatagaggagctgtgcagacacaggaacgaacactcagacagagggagcagctgtgcaaaggcccagaggcaggaggatggggtgggggacagagcagagggagagggaatgtttgagggtacagacaactggcagagacctggagggtttcctgtgaggagagagcctgccagggcttagggactaggaaaaaatgtcatgtttccttagctggtggcaggggctacagggcacatggcacaatacacatgtaaaggtcagaggacaacttctggggaccaggactctctttcccaccatgcaggtctcaggaattgaactcaggtcttcaatcttagccaaaagtgccctacccctggagccactgcacctgtctgaatgagcgtcttttttttttctttcttttcttttcttttcttttcttttctttttttttttttttttttttttttttttttggtttttcgagacaaggtttctctgtatagtctatagtcctggctgtcctggaactcactttgtagtgtagaccaggctggcctcaaactcagaaatccgcctgcctctgcctccccaatgctgggattaaaggagtgcgccaccacgcctggctatgagcgtcatttttattgcagcattactttcaggtccttgaaatcagtcatcagaacctcaaaagtgcgatgcaggggacttcatctcaatgtggcagatcagaaatctgcctgcttctgcctccaaagtgctgatgggactaaaggtgtgcaccaccactgcccagtttacaagttttcttaatatgaaggcttccaggtgtgacaagcaggcctgaggccccacactcctaaggctgcttcatggagttaagagcttttgttgctggaagacctaagttcaattcccagcacttacatggtggctcaaaattacctgtaactccagtttcagggaatcccctgccctcttctgacttctgcaggcgccaggcatacacatagtgcacaaacacacatgcagacaagacagtcttacatataaaggaaataaatctaaagacacaacaaaaactcaggctagtgaggttttctctattgctgggtggagacacgttggccaaagcaagttatacaagaacagtttatttgggggttatgtttccaaagggttggaatccgtgaccatcatggcagggaatgaggcagcaggcagtcaggcagccatgaagttggagcagtagctgagagctcacatcttgagataaaccaggagtcagagagagaaactgggcctagtgtaggttttgagatctcaaagcccaccaccagtgactcacctcctcctataacaagaccacaccccctaagtcttcccaaacagttccaccaattggggaccaaatattcaaatggataagcctgagaggtggggcattctgtttgattgtttgagagagggtctctctacattgccacaccaatgctggaattcactatgtaaactaggctggaccggaactcacagagattctcctgcctctgtctcctgagtgctgggattaaaggcatgcgccaccaagcctggcctatggggactattcttattcaaaccatcacaatagctcagttcctaaaggtatttgcttctctctgaacctagcaatttgagttcaattcccagaacccaaatggtagaagaaaaagaaaaaaaaattctcaaaggccacagattctggggtacacctttccttcccccaaaaatataattttaaaaatttatcaaaaaccaggcagtgttggcgcatgcctttagtcccattacttaggaggcagaggcaggtggatttctgagttcaaggccagagtgagttccaagacagccagggctatacagagaaaccatgtctcaaaaacaacaacaacaataaaaatcccaacaacaataaaatttattaaaaagttaagtgtggtattaaatacccttaatctcagtgctctcgaggcagaagcagaagcagaagctgaagcagaagcagacagctctctgagttcaaggccagcctcatctacaaagtgagtttcaggccacccagggctacacagagaaaccctgtcttgaaaacaaaccagtcaaccaaccaatgattacatgcatacataactaaataaaaaacagagtaaatgttaaaatttatttctaatatgtaaattataagtaaaaaaatgcctttgtgccttgtggcacaggcttagactcccagcgccaggagaagacaggagagtcccccaggctcactgccagctaggttggccaaatgggcaagtccctgatcccagtgaaagacctcagctcagaagctgaagtgaatagttgctgagcaaggacagctgaggttggctttggtcttcatatgcacacactgttgcgaacatacacatgcacacacccagtggaaaaatgcaggctttcaagctatgaagtcatctcaaacaggcctgcacctgtgctcacagcttgccaaacccatgctcgctccagggcaccggagtcctatttaggagttctcacagtgtgtagctgtgcagcccaacaccttccttctttgacatgagggggagagagcagggttcaggaaaggaatccagaaagctcccttctggagtaaactgggtctctgttgacgtcaccaaccatgccttctagtaacccatgcatccacaggctcagagtggtatttggtctagaactgcctcctgagtatttggtgagtgaccaactaacctaatgattcagaccagagcacgtacaacatctgtcccatgatcgcccacgtcacagaaggacagcagccaagggtctgctggtggctgcccctgggaggagtctccctgtcctaagggtggacaattgcgctgactctgggagagcccctcaccctagggactttgtgagtcacagtttatccaggaaacagctatgatggacagactgttcagtgtcaggtcccgaaggcacacccagtggatgtgggtccctcatgaaggcagactttaaggattcagtttccttattttaaaatactgattatatttttattattagtgtgatatgtgtgaaggcatacatgccacagcatggaggtcagaggccaactctacggtgtgggctctctccttccacgtgccccagggatcaaacttaggtcattagttttacgacacaggtgctctgcccgctgaaccatcctaccagcctgaggcttcagttttctgaagtcataaaaacaggtggcttaaaaaagcagaaatttgggggctggagagatggcttagtggttaagagcgctggctgctcttcctagaggacctaggttcaattcccaatacctatttggcagcctatactgtttgtagctccaattccaggggatctgacaccctcacacacagaggtagaacaccaatgcacattaacacagtaaagcaagcaagacaagaagagcagagatttgggggtaagagatggttaacagcacgcactgctcctccagaggacctgagttcaacttccagcacccacatcagtgggcttatgactaggacctctggcctccaggagggactagtcggcaagtgcacacttacacatgcacagaatttttaaaaactaagtaaatcatttttaaaggcagagatttggacctggttcagtggaatacaaatgagatcccagcattccaaaggctgaggtaagaggatcgggagtttaaggtgagtctgccgtagaaggtaagactcagccacacagtggtggcacatgattttaaatccctgcactggggaggcagaggcagaggcaggtggatctctgtgagttcaaggccagcctggtctacagaaagactgccaggacagccaggactgtcacacagagaaaccctgcctcgaaaaaaaaaaaaatattaagaccctgtccccaaaaataaaaaagctgagggctgaattgaatccccagagcccgtcgtgtacgttgtatatcctctggcctacactcacatgcacacatatgaacatgctcacacaaacacatacatacaccttattttaaaacaacaacaacaacaacagaaacaaacaaaaccaggcatcgccaactgaatttgtcctgttcttccggagtctaggacgaaatcacagtggctcctcccatccagcccatgcccctccgctggattctggtgacttccatcaatccttgaaggtctgctatttctaagaagcaccccttttctctgctgctaccgtcaaacagccctccctagtgtatgtctgtctgtcgttcacttctggactgggctgtggatgagcactggcctagcacctagcaagaccctctctttatctgcagccctacaaaaataaaagacatagataaatagataagtgtctgaggttgggggcccaggcagtaatgtgcttcccttgcaaacatgagacctgagttccattcacagaacctatgcgtgctgtcctaaacttgtaatcccagcccggggcgaggtgggggtgttggggcggcggcccagacaggagtcttgctgaggctc

SEQ ID NO: 2143 - DNA, 2244 bp, Mus musculus
ggtgtcgtgcggcgcatcgggaggggcggaaggttctggagggctggcgggatctggaagcttccgccggacgggtatatagagtccgggacggggcagcagcggagccggaggcggcgacagctgggcggcggtggccatgggcaaggactactatcagacgctgggcctggcccgcggcgcgtccgacgacgagatcaagcgagcctaccgccgccaggcgctgcgctaccacccggacaagaacaaggagcccggcgctgaggagaagttcaaggagatcgccgaggcctacgacgtgctcagcgacccgcgcaagcgcgagattttcgaccgctatggagaggaaggcctgaagggtggtagccccagtggaggaagcagtggtggtgctaatggtacctctttcagctacacattccacggagacccccatgccatgtttgctgagttcttcggtggcagaaacccctttgataccttttttgggcagcgcaacggggaagaaggcatggacattgatgacacattctctagctttccaatgggtatgggtggcttcaccaacatgaactttggacgttcccgcccttctcaagagcccacccggaagaagcaagatcctccagtcacccatgaccttcgggtctcccttgaagagatctacagcggctgtaccaagaagatgaaaatctcccacaagcggctgaaccctgatggaaagagcattcgaaatgaagataagatcctgaccatcgaagtgaagaggggctggaaagaagggaccaaaatcacctttcccaaggaaggggaccagacctcgaacaacattccagcagacatcgtctttgttttaaaggacaagccacacaatatcttcaagagagatggttctgatgtcatctatccagccaggattagccttcgggaggctctctgtggttgcactgtgaatgtccctactctggacggcaggaccatccctgttgtattcaaagatgtcatcaggcctggtatgcggcggaaagtccctggagaaggcctccctctccccaaaacacctgagaaacgtggagaccttgttatcgagtttgaagtgatcttcccggaaaggattcccgtctcatccagaaccatcctggagcaggttcttcccatatagccacctgcactcctcaaggactgagccaggggctttcagcgctgcagatctccagaccgttccactggttgcatatgcgggagggcccagggagggcttttgctctgccgaatgttttccacagaatatattacaatctttcaaagtcgcgcactagactacagtggtttttcgagcgataggcaggcggtgggaacagcagccctcctggaatggacccaccctctgcaccccagctcctgcccaagggtgtgaggcaggcctgcaactggactcttgccctctgttgtccttagtctggctgtcatgtgacagtggtccgccatctcagttgccagaccctgtgcactagtcagtctccactgtgtgggaggttcttgttttatctgtatttgtcccatgccttgttcctcctccccagaagagtcctgtcttgtcttggccatctcaaattgagaccaattccctaggactgccaggccagcatcacaagcaatacctggttgcaggaccacagggccagcctccttccaggttctggggcctggccagccaggagatcccctggacctctggctccattgacatcagatggctggcttacagtcacagtacttgctggtccagaggtagaccttggccacacctggcacttctcagaggcacaggtgattttgtgtgtgtgtgtgtgtgtgtgtgtgtgtgtgtgtgtgtgtgtgtgtgtgtaatggactctgaactctagaaggatacaatccttttggattttgcacagtcctagatctaatcccttttgataaaagggtctttgcttctgatgaaaggagcactgtggaacgtatgtaaatatgtttttataattccattggaagctggtgtgcactcagacgaaagcagtccctgtcaactactgtccagggctgtgatgggatcagacctgggcgtgaaagtatctgttctttggagctagcctggtgttctgaccattcaactcattgtaagttgccactaccaacacaagaccaaagtgtgtgacttgtcattatgcagtgtgacagcattaaagactgatgctaaacctc

SEQ ID NO: 2144 - protein, 355 aa, Mus musculus
SPGRGSSGAGGGDSWAAVAMGKDYYQTLGLRASDDEIKRAYRRQALRYHPDKNKEPGAEEKFKEIAEAYDVLSDPRKREIFDRYGEEGLKGGSPSGGSSGGANGTSFSYTFHGDPHAMFAEFFGGRNPFDTFFGQRNGEEGMDIDDTFSSFPMGMGGFTNMNFGRSRPSQEPTRKKQDPPVTHDLRVSLEEIYSGCTKKMKISHKRLNPDGKSIRNEDKILTIEVKRGWKEGTKITFPKEGDQTSNNIPADIVFVLKDKPHNIFKRDGSDVIYPARISLREALCGCTVNVPTLDGRTIPVVFKDVIRPGMRRKVPGEGLPLPKTPEKRGDLVIEFEVIFPERIPVSSRTIQVLPI

SEQ ID NO: 2145 - DNA, 23679 bp, Homo sapiens
ctaaaaatacaaaaattagccgggcgtggtggtacacacctgtagtcccagctaatcaggaggctgaggcagaagaattgcttgaacccgggaggcggaggttgcagtgagccaagatctcgccactacactccagcctgagcaacagaccgtctcaaaaaaaaaaaaagaaaaaagaaaaagaaatgggactggtccaaattgagatgtgctgtaaatgaaaaacacataaatttctggccaggcacggtggctcacacctgtaatcccagcacttcgggaggccaagacaggcagatcacatgaggtcaggaattcaagaccagcctggacaacgtggtgaaaccctgtctctactaaaaatacaaaaattagccaggtgtaatggtgggcacctgtaatcccagctactagggaggctgagaatcgcttgaacccgggaggtggaggttgcagtgagccaagatcgcaccactgcactccagcctgggcgacagagtgagattctgtctcaaaaaaaaaagaaaaaaaaagaaaagacttttgacagacaaaggaacaggcagtacctggcacacttcttcacctcctctccttactcttgtttccagatcctgcccctgagctttcatgagctgttgaaccatctggaattcacaggcctgtcatgagagacacgatgagaagtccttaaaggtagatcactgattcacaggggagcaggcggaggcaagggtgagtcagtgcttggaactcagtcatccagatttggctctggaaacttctgaagctgtagcctttggggatccctgactgcgagtacaggaagccaacgctatgtggtcttctggaaactcattatctttttcactggtgctatctgggaaaaacagatgaaaacctgaaggtgttctgtatgtgtgctttcaaaagcaaggatctggccggacgcagtggctcaggcctgtaatcccagcactttgggaggccgaggcaggaggatcacctgaggtcaggagtttgagaccagcttggccaacatggcgaaaccatctctactaaaagtacaaaaattatctgggtgtggtggtgggtacctgtaatcacagctactcaagtagctgaggcagaagaatcagttgaacccaggaggcagaggttgcagtgagcagagatcacaccactgcactccagcctgggtgacaagaatgaaactccgtctcaaaaaaaaaaaaaaaaaaaaaaaaaaaaaaaaagcagagatatttttctggtggcagtttgagttttgaggccttctgtgtcatgacaggcctcactccctgcccttcttgggtgctgggggagagtatttgcttccaggccacaagttaattttttagtagagatgggatctcattatgttgcccaggctgctctggaactcctggcctcaagtgatcctccctcctcggcctcccaaagcgctgggattacaggcatgagccatcccactcggcctgagaccacagttaaaatcctatcagattgagttacctgaggtacttgattgtgaggggccatggggatagggttgaaaccctaagacccatccatgtgttgctccttcaccagttatgcaaattttcaacttatttaatgtgatctgaagaggtgagtcttccatctctgggttgcagttagatagggcatgatggtgtacaagtaggtgtcattttgaagagattccatacatattcccataaactcagaacgttttggaaattcccttttgagactgcttttctgagccccacacttactcaacaggcaccaaatcatcctcatgcacctactatgctgcgtgtcaaccggaacatacaaataatttccaccccctcctcacccataagaagctggcagaaaggcaagatccagcctccaaagtagaattcctctttgtttttgaggggtgttgcaggcttgaggaaccccttgtttgcccatctggcttccggtaaccaggctgtcagcagaaatgaaacccacccttggaatgaagactggccactttgttcaagccactgaggacactgtactgtggccccctgacagtgcctgtctgtagggacagctagatcctgctggtcccttcacagtcccagcagtggctgattcacaatggtgactggtagatctgttgggtcgttgttgagctgatggtaactagctcctttattaaagtaatttccaagggagaaactgcaagagacggcctaagctgcggcagcttccaaggatgagcttttctggacctcaggtttggggggaacccgagaccatttgaatgccagagatgtgatgtgtttggtaatgtcgtgtctcacaagctccttttgtatttcccatgggcagatcaggtcggatcttgactttttccagaacctggcttggctggtttgggttgtgtatgaatgagctggctcgctgggtgtgtgaggggaggtgaagctgggactagacaagccagggctcgttagcaagtttctgctgtgtcaggaatcccagagagaggtttcccaagccctatcctgtcttgcctgggttgtttggtttttctccttcttttttttttcttcattgaagtgtaattgacatgtagtaaaattcacccattttagtgtacagctctgaacacatacggtcatgcaaccaccactacaatcaagatacagagcatttacaccaacccaaaaaattctccaaactactccatttgttgcaggtcccagcccctggcaagcattcatctgctttctgtcctgatacttttgccttttccagaaggttgagtgaaatggaatcatgcagccttttgagcctggcttctttcacccacataatgcatatgaggttcatctgtaatgttgtttttttgtatccgtagctcattcctttttatagctgaatagtattccattgtgtggatggatcccatttgtttatccattcatccattgaaggacagttagggtttaactgctgttggtaataactaataaagcctcagcaaacattcgctcatgagactccatctcaaaaaaaaaacaaaaaaagtagattttaccctgctggtgttgctatgttgatgaaattgagaggagccaggaaatgaacattataatagtatcttttttatttttatttttgagatggagtctcgctctgtcacccaggctggagtgcagtggcgcaatctcggctcactgcaacctccaccttctgggttcaagcgattctcctgcatcagcctcccgaatagctgggttacaggtgtgcaccaccatgcccagctaatttttgtgtttttagtacagacggaatttcaccatgttggtcaggatggtctccatctcttgaccttgtgatcctcccgcctcggcctcccaaagtgctgggattacaggcatgagccaccgcacccagccatgaatttttatatatgaacaaaggttttcatttcacatgggtatcccactgggagtgggattgttggctcatatggctatagcgctttttgaaggtcttttttttttttttttttttttgagaacgagtctcgctctgttgtccaggctggagtgcagtggcaccatctcggctcattgcaacctccacctcctaggttcaagtgattctcctgcctcagcctcccaaatagctgggattacaggtgcacgccaccatgcctgactaatttttgcatttttaatagagatggggtttcaccatgttggccaggctggtctcgaactcctgacttcaagggatccacctgcctcagcctcccaaagtgctgagattacaggcatgagccaccgcacccagccttgaagatcttttccaaatttatttggatttttatttatttttgagacagggtctcactgtctctcaggctagtgtgcagtggcacactcatagctcactgcagcttggaattcctgagctcaagtgatcctcccacctcagcctcccaagtagctggcacgtgccaccatgcccagcttatttctttgtcattctttgcagatatggggtctcactatgtgggccaggctgatctggaactcctgggctcaagtgatcctcctgccttggcctccaaaagtgctgggattacagatgtgagccaccgcacctggcctgaaggtctttttttcaacaggtgaagagctgaagacaggagtaatgcaattttcttaaaattaaggctttatgatcatctgagtcacattatacacaagctgagtgtctactgtaagcactcagtatgctaaacacttcagcattttactctctgggtgaccctggggaagtcacatgacctctcagaatctccatctccccacctgtaaaatgggtgtaatgatagcccaacctcatagggctgttgtgacaagtatatgagttaatattcatcgagtacttggaacaggcttggccatgtcagtgttagatgttattataggccagacatggtggcttatgcctgtaatcccaacacttggggaggccaaggccggcggatcacctgagctcaggtgttcgagaccaacctgagcaacatggcaaaaccccatctctaccaaaaccataatacaaaaaattagccgggcatggtggcaggcacctgtgatcccaactactcaggaggctggggcaggaggatcatttgaacctgggaggtggaggttgcagtgagccaagattgtgccactgtgctccagcatgggtgacagtgtgagaccccatctcaaaaaaaaaaaaaaacaaaaacaaggccgggtgtagggttcaacccttgtaatcccagcactttgggaggccaaggtgggtggatcatgagatcaggagttcgagattagcctggccaacatggtgaaacccagtctctactaaaaatacaaaaattagccaggtgtggtggtaggcacctataatcccagctactcaggaggctgaggcagagaatcgcttgaacccaggaggcggaagttgcagtgagctgagatcacaccactgcactccagcctgggtgacagagtgagactccatctcaaaaataaaaataaaaatgttattataatgttcatttcctgttcacttcctgttcatttcctctcaatttcatccacatagcaacaccagcagcgtaaaatctactcttttcttttcttttcttttcgagacagagtctggctctgttgcccaggctggagtacagtggcgtgatcttggctcactgcaacctccacctcccaggttcaagcgattctcctgcctcagcctcccgagtagctgggagtatgggcacatgccaccatgcccagctaatttttgtgtttttagtagagacatttcaccacgttggacaggctggtctcaaactcctgacctcaagtgatccacccgcctcagcttcccaaagtgctgggattacaggcatgagccaccgcacccggcctaatctactcttatctccaatttatggaggacagacctaatgctcccagagatcaagcaggctgtggaagatcacacacgtaggaaataaggaaacagttggtccaggatttgaactaaagcaactgtcctcagactcacttgcatagttcctgtatcagtcaggattttaccaaagacacagagccagagccagtaggagtgtgtgtgtgtgtgtgtgtgtgtgtgtgtgtgtgtgtgtgtgtctgtgtgtctgtgtgtgtgtctgtgtttgtgtgcagagatttatttcaaggaattggcttacatgcttgtgggggctggctagacaacaccaaaatctgctgggtgggctagcaggctggaaacttaggcaggagctgatgctttttctgccgggaaacctcagtgtttgctttcagtgttggcttttttttttttttttttttcttcgagacagagtcttgctctgtcaccaggctggagtgcagcggcctgatcttggctcactgcaacctctgcctcctgggttcaagtaattctcctgcctcagcctcccaaagtgctgggattacaggcgtgacccaccacacccggcctcagtgttggctttttaaagtctctagactgattggatgaggcccgcttacatcctcacatccttgagggtcatgtcctgtttttaaagtcaagcaactgtagacgtgctaacctaaccgcatcaacataataacttcacagcaacacctagattagtgtttagttgaataactaggttctagagcttagccacgctgacacaacaaacaactataacagcttttccaagttaagagcccaatatctgctgaagttgacgcagaggccattttttcagtaatattctgaagttctcagtgagtgttcaggtcacagtaccatgtccattaggagagagttactgggtttgtttgtttgtttaatttcctggctcctagaactgattaaaaaaaaaaaaattaaaacttcccgaactggctgggcgtggtggctcacgcctgtaatcccagcaccttgggagatcaaggcgtgttgatcacctgaggtcaggagttcaagaccagcctggccaacatggtgaaaccccatctctactaaaactacaaaaattagccaggcatggtcgcaagcacctgtagtcctagctacttgggaggctaaggcaggagaatcacttgaacccaggaggcggaggttgcagtgagctgagatcgtgccactgcactccagcctgggctacaagagtgaaactccatctcaaaacaaacaaacaaaacttcctgaacatgacccaggcttactcaaggaggggagagttcccagctctaacactgaccccaagcacaaagacatcccttccgcagtgtttttagcaaaatgttcccctccagtgtgtcaagaaacttttattattattattattattattattattattattattattttgaaactctcactctgtcacccagtctggagcacagtggcacgatcttggctcactgcaacctctgcctctcgggttgaagcgagtctcatgcctcagcctccagcgtagctgggattacaggcacctgccaccgcacccgactaatttttgtatttttagtagagacggggtttcaccacgttggccagactggtctcgaactcctgacctcaggtgatccacctgcctcagcctcccaaagtgctgggattataggcgttgagtcaccgtgcctggcctatggcaagaaactttagaacaaccagaaaggcccacccagagccatgttaaagcctttggaggctgctgcacttgtaattctaaattaaatttatattataaaatactagtttataaagtcacaagctctgagtttttccccataatgctcctgatagttatttatataatttttttatggggaggttcaggatctcactgtcatccaggctggagagcagtggcacaatcatagctgactgcagcctcaaattcctgggctcaagctatcctcctaccttggtccactgagtagctgggactacaggctcacatcattgcacccggctaattttttttatttttaattttttgtatagatggggtctcactatgttgcccaggctggaactcctggcctcaaaagatcctcccacctcaccttcccagaatgctgggatgacaggcgtgagccactgtgcccagcctagtaactttttaaaaaatatcaagttctctctccccataattgcttcaggacccctgctcaagtatggttctcgatgtctagggaatttcagccccatcctcccgggttgtccagttctagtccagagttcttgctgatgcagttacctcagagatcattgagtgggccaagagaaccagatctgcctgctggatgctcctgatagttatttatgtaactatccgccatgatgctcctgatagttatttatgtaacttttttatggggaggctgagggtctcactgtcacccaggctggagtgcagtggcacaatcatagctgcctgcagcctcaaattcctgggctcaagagatcctcccgcctcaggaggcaggaggatggtcttcttcttcaggagtccctgtctgcccaggggcagctgtcactggaatcttttagctgccaggaatgaggtgatggctgaagagcccaccactaagaaaatggttagtcacccctttgacaatgcttcctttgtgccatgcctgctctgagcactttgcaaatgttgactcatataaacttcaaagccctcatgatgtgggcacaactgctatcctcattcctcattgtgcagatgaggaagctaaggccagcaaaggcctagtaactaacccaaggttacccagccgggaaatgctggagctgggaatgaagcccagctgtctggttccagagccagtgttacatggctctgacctcccaggcagttcttccaggaacctcccccacttccctgggcccttcccaggtggaacccctttctgagcctccttttcccatcagctctgtccttgacagaggcaccccagactttcagagccaaacgcgatcgtgttgcctacaattgaggaaacagaggccttgaaaggtgtgtgacacacctatgtccccccaaattataaaggtagttggggaagaaaaagaagcacgtgtgtaagaacggggaatatttatgaggttctcactgcgttccaggcactggggacccagtgcagacaggacctggcccctgcccaggtggcgatgtcagactgggagggaagacacattgaaagccaagagacaagataaatttcaaatttagcggcaagtgatcttgagagggcagtaaagggaagaaggcgggactgggaggaccttgggagatgcgcttccgtccagatcctcaccttgctttaggaggtgagaacagaggcagtcttccgtcccaaaatccttctccccacggttgggagaatagcgctggtgggttttttgttcattttactttattttacttattttatttatttatgagacggagtctcgctctgttgccgaggctggagtgcaacggccggatctcggctcactgcaacctccgcctccccgattcaagctattctcaggcctcaatctcctgagtagctgggattacaggttcgtgccaccaacgcccgggtaatttttatatttttagcagagatggggtttcaccatgttggccaggctggtctcgaactcctgacctcaagtgatccgcccgcctcggcctcccaaaatgctgggattacaggcgtgagccaccgcgcccggcctgtttgttaatcttaaatagaaacggagtctccttatgttgcctaggctggtctccaactcctaggctcaagagatcctcctgtcttggcctcaggaagtgatgggattacaggcatgaggctccgcgcccggcctgataggttctcttattgccatgttgtagatagaagggggcccctgggttaggcagacacaggttaggtagttcgtccggcgtcaccgggcgggagcccaccgcaggccccacgagacaagggcgagcaggttcatcgcctcccggggaaaggactgggtagtcccaggccccaccccttcctggaacagcaagttcgctgtgggtcccgacctactgacccaggcggagggcgggacgcagggtagctggggccgcgtagagagggaaagaaggtcgcgattggctcgtcccgaaaggtgggcggggcctcctccgacctgtgcgcgcgcgccgcggggaggtgttgccgagggcggagcgggagggggcgtggccccgcgcgggcggccgttgacggcgaggccccgccccggatgtcgcgtgtcgctgaaagggcggcggcgattggccggcgccgcgggggcgggcggggcggaaggttctggagggggctggcgggctctggaagcttccgccggacgggtatatagagtccgggactggtcggcggcggagccgggggacggcgacagcgggtcggcgggccgcaggagggggtcatgggtaaagactactaccagacgttgggcctggcccgcggcgcgtcggacgaggagatcaagcgggcctaccgccgccaggcgctgcgctaccacccggacaagaacaaggagcccggcgccgaggagaagttcaaggagatcgctgaggcctacgacgtgctcagcgacccgcgcaagcgcgagatcttcgaccgctacggggaggaaggtgtgtgctcgcggccaggggcgcggccccgccttttgacagacagggaaactgaggcacgctggcccctctcggcggccccccgggaaggacgccccgggccgtggggccgagctgccccgccctccggcctcgcgggcctccgccctcggattggcggccgcgcggtgggaggaggagccttggcccagccgctcggccagaagcttctagcatgtctggggctgcccctccccgggcgcctcctcccgcggccccgagcagccccggggtgcggtgcatgggggtgggggagccgggggtgacgacggggacggcgcggcggagcccgctgcggacccgggctcacctgggctcggccgccggggtccgcggggcggcgcctccggctcagctgcggggcgaggggttgtgaatgcaggagccgaccccgttcgtgggcttgggggctgggttgggataattcccgggaagtgatgacctggccccggcagggcacgcaggaggcagcggccgcccaggtccggagagcggggccgcctcggagggtaaggagagcagggctttttgttcctgtgcccgttgatgattcaggctggcttctgggcttgatctggagctgactttttgtgcaaggatggtggcagtgaatgctaatgtgtgaggatttaaaaactccctatttatttttgtttttttttttcttctcttcctacgcaccattagccctaaaacgttgagagtaaacacttaccgaaagccgaccctggaccatgtgtctttagccatctcttggtgatgttgccaggaggatgggtcagtccaggagtggcagggcctaggtggcacctggaggtgaacacctaaccgcatgagtccttttccactgtcaggctacgcggaaatactgttggtaggggggcgtctctgctgttggcagtgagaggtagaaacttggggttcttccttgctctcccctgacagacaaaaaagttcctcccccatggcttccaagctgtttccccctgtaagggaagctcgagagagagtctgctgttcagccatctgactgcttctaaatctgcttttcaggcctaaaggggagtggccccagtggcggtagcggcggtggtgccaatggtacctctttcagctacacattccatggagaccctcatgccatgtttgctgagttcttcggtggcagaaatccctttgacaccttttttgggcagcggaacggggaggaaggcatggacattgatgacccattctctggcttccctatgggcatgggtggcttcaccaacgtgaactttggccgctcccgctctgcccaagagcccgcccgaaagaagcaagatcccccagtcacccacgaccttcgagtctcccttgaagagatctacagcggctgtaccaagaagatgaaaatctcccacaagcggctaaaccccgacggaaagagcattcgaaacgaagacaaaatattgaccatcgaagtgaagaaggggtggaaagaaggaaccaaaatcactttccccaaggaaggagaccagacctccaacaacattccagctgatatcgtctttgttttaaaggacaagccccacaatatctttaagagagatggctctgatgtcatttatcctgccaggatcagcctccgggaggtaaggtgccaggtggggcggtgtctgtagagggcgatggctgctttttgaagcagtttagtatttgctgaaccaatgtgttggggtgtgtggtgcgtgccaggcttggggcacaacagtgaacaggactgaccagggcgctgttgtggagctttcgtggtggggacgtgtagatttgggggccaggtcttagctgcagaggcctgatgggtcttatctatggcagacggcctctgggcaagagctgagcctcttgagccagcttccatctaatgctgtccttttgcttttcaaggctctgtgtggctgcacagtgaacgtccccactctggacggcaggacgatacccgtcgtattcaaagatgttatcaggcctggcatgcggcgaaaagttcctggagaaggcctccccctccccaaaacacccgagaaacgtggggacctcattattgagtttgaagtgatcttccccgaaaggattccccagacatcaagaaccgtacttgagcaggttcttccaatatagctatctgagctccccaaggactgaccagggacctttccagagctcaaggatttctggacctttctaccagttgtggaccatgagagggtgggagggcccagggagggctttcgtactgctgaatgttttccagagcatatattacaatctttcaaagtcgcacactagacttcagtggtttttcgagctatagggcatcaggtggtgggaacagcaggaaaaggcattccagtctgccccactgggtctggcagccctcccgggatgggcccacatccacctccagtccctggccaggggtgagaggcagaccagcagatggacttgatccctctgtgtctttttgcttctggctggtagataatgtcaacctgcagtcttgattcccagaccctgtacactcctccttttctgttgtgtgatcagtttgtgctttattctgtatttgtctcccatgtcttgctcttctcctggagaattctgtcttctctttggccatctcaaattgagaacctaaactattcctgcagaactgcctggttggcgtccacaagcaatacctctcgttccagcaggaccaagggagccagcctccagtgagtgactccagcaagtgcagccacctctcccttgatggtctgggagcctggcctcagcaaggggccttcctgacctctggctccagtgaagctgaatgtcctcactttgtgggtcacactctttacatttctgtaaggcaatcttggcacacgtggggcttaccagtggcccaggtaattttttgtttcatggactatggactctttcaaagggatctgatccttttgaattttgcacagccctagatacaatcccttttgataaaagggtctttgcttctgattacaggagcactgtggaacgtctgtaaatatgtttttataattccatgtatagttggtgtacactcaaaacctgtccccggcagccagtgctctctgtatagggccataatggaattctgaagaaatcttggggagggaaggggagttggaacaaatgtctgttccctggaggccagtccagtgctcagacctttagactcattgtaagttgccactgccaacatgagaccaaagtgtgtgactagtcaatgaagtgcgacagcattaaagactgatgctaaacctcaggggagcggtcctgtgactctgtttgagggttctgctggttttgggggtggagtggggagctgggcatccttccaaattcaatcaaggtgagagggtgggatgggcaggaggcaagtgccctgcaagggaaacgtaagtctcccttcctcagccataagtgggttggagaacttctacccagactcggggtccaaaaaaccagagacccaagcacagtggccttggggatcattttttgatgaaggttggagtcaaagtagcggtggggagaggcagggtctggctcctaattctgcctttcttcagggtccctggctttttcagcagaccttggctctggggccaaggggccaacccagggtctggcctcttaattccttatcactccttccctgctagaacgggctgggcgtcctgaaggctggccaaaccggagctcaaggtcctgcccaggactagccccactgtagagaggacccatttcctgccttggctttatttgcaggctactaaagctgcttttactttgtaactttctttaaaataactggttttattataaagtaattgctcaggcttaaaacaatgtattgctgctttgttacaaaatgttctaaagtggaaacactgtatatagaccaggagcagtggctcaggcatgtaatcccagtactttgggaggccaaggtgggtagatcccttgagctcaggagtttgagaccagcctagacaacattgtgaaaccccatctctacaaaatttaaaaattcagccggagaatgcagcgtacacctgtagggccagctatttatgggactgaggcaggaggatcaattgagcccaagaggtggaggcagtagcaagctgtgtttgtgccactgcactccaacctgggtgacaaagtgagaccctgtatcaagaaaaaaaaactaaaacacagtatccaaaagtcaaactgggccagacgcagtggctcacacctgtaatcccagcactttgggaggccaaggcgggcagatcacctgaggtcaggagtttcagaccagcctggccaacatggtgaaaccccgtctctattaaaacaaaaagccaggcgtggtgcacgtacctgtagtcccatttactcaggaggctgaggcaggagaatcacttgaacatgggaggcagaggttgcagtgagcaaagatcccaccactgcactccagcctgggtgacagagcgaggctgtgtctcacaaaaaagtgtcaagctaagagttgctttcccttcccactgaaacagttgaagcgctgaaaacaggctaggggcagccctgccagtccaggagaactttctgcaatgactagaacgttctatataccgtttacttaaacatcttacaaattcaataaaattagaatcagttcctcagtcctgccacacttcagttgcttagcagccacacatgtatgtggccagtggcaactgttggacaagtcaagtctagagggcttttccctaaagacattgcaggggtgactttgaagagcagccacattaagccaggagacgccagcccaatcaggaggtgaccctggaatatcaagagctaagagatgtttaccaaagtatcccacacgccaaggtcacatttattgcggaactgacctgacctcattggtgacacaaatcccagggctgccatccccacccccaagtctccattatacaccaagtccctgtgaacttcatactgaagtgtcacaaacataaaggtgcacgaagccttgaggtatatacaattctgggaacttcacaaaaaacacggccaagcaacctaccaggtagcagtgtgaggagtgggacggtgggattttgaggggaaaatcttggtggtaaaagggcccaaagacctttcacacatgcatttttttgctcaaaggccactacttggcttgtctatcttggccggatatctggtgcacccacatgcaaacttttcccaaagtcttgggcttgttttttttttttttttttttcagacagagtctcgctctatccaagctggagcgcggtggtgcaatctcggctcactgcgatctccaccttccaggttcaagcaattctcagccttccaagtagctgagattacaggcgtgcgccaccacgccaggctaatttttgtattcttagtatagagatggggtttcaccatgttggccaggctggcctcaaactcctgacctcaagtgatcggcgccccctcggcctcacaaagtgctgggattacaggtgtgagccaccgcactcaggattttttttttaatttctttttttgaagacaggatttcactctgttgtccaggctggagtgcagtggtaggatcatagctcactgcagcctcaaactcctgggctcaagcaatcctcccgcctctcaacctcttgagtagctaggaccacaggcactccacaccacaaccagccaatttgtctaatttttgtagagatgatttgttgatatgttaacttttttgcggggagggggatggagtcttgctctgttgcctaggctggagtgcagtggtgcaatcttggctcactacaacctccacttcccgggttcaagtgattctcctgtctcagcctcctgagtagctgggactacaggcacatgacatcacgcccagctaatttttgtatttttactagagatggggtttcatcatgttggtcgggatggtcttgatctcttgacctcgtgatgtgcctgctttggcctcccaaagtgctgggattacaggcgtgagccacttctaccttcctttttttttttttttttttttaattttttttcctgagacggaatcttgctcttttgcccatgctggagtgcagtggcgcaatctcggctcactgcaacctctgcctcctgggttcaagcgattctcctgcctcagcctcccgagtaactgggattacaggcgtgtgctaccatgcctggttaattttttatttttagtagagactgggtttcaccatgttggccaggctggtcttgaactcctgacctcaagtgatccacctgcctcggcctcccaaagtgctgggatgacaggcgtgaacctgcgctggccgatatcttgatatcttgatatgttgctctggccccaagcgattctcccaccttggcctcccaaagctctgggattataggctcagccttgggctttctttaatggatttatttcacttttccatgctgcatctctgatcaggtctcagagctccttccatgacagtacgtgtgcaactgactcattctttgacccacctgcattacaataccagcagtgttttttttttataatcataggacagcactcaataggtccatttggcctatggtgaaaagccgagtcctcccatccttcccctggccctgaagttccccatcctactgcaccactatagacactggcattggcatcacagattttttttttttttttccttttctcatttttgagacagagtctcggtctgtcgccaaggctggagtgcagtggtgcaatctcggctcactgcaacctctgcctcccaggctcaaacgaccctcctggctcagcttccctagtagctgggattacaggcgcgtaccaccacgcccggctaatttttgtatttttagtggagacaggatttcatcatgttggcccaggctagtctcaaactcctgacctcaagtgatccgcccacctcagcctcccaaagtgctgggatgacaggcgtgagtcactgcacccggcctttttttccttttttaaaaaaaccatttttgtgcttcctccaagagatgagtctgtgcttacataagcataaacacaatttctaaattttcagttttattttttgactgtgtaatcacaatacaacactggaaaggatacagagagtgaaagtcctccctcccaccctaccatccgattccacacccccgaactggatacgaatgttccccgtctctcctgcgcctttcctgagatgctgcggggaatacatttttctttttttacacaaggagtacatactgtacactccgctttttttttttttttttctcacacaagatgctgtgaacataaagagcttcctcattcctgtgctattccccacctttattctggcaggtccacccagctgggtgtgaagatctaaattagtgtttggcgacccctgactcctctcacatcgttcttgcttccggatttgagtcccagtttgattgcttgcttttgttttttttcttttcttttcttttcttttctttcttttttttttttttttttttgacacggagtcttgccctgtcacccaggctggagtacaatgatgcaatctcagctcactgcaacctccgcctcccaagttcaaacaattatcctgcctcagccttccgagtagttgggattacaggcacccgccaccacacccagctaatttttgtatttttagtagagatggggtttcaccgtgttggtcaggctggtctcgaactcctgacctcaggtgatccaccctcctaaaacgttagctgagcattagccaggtgtggtggctcatgcttgtaatcccagctctttgggaggccgaggcggatggatcacttgaggtcaagagttcaagaccagcctggccaacgtggtgaaactctgtctctactaaaaatacaaagctgggcgtggtggcaggtgcctgtaatcccagctactcaggaggctgaggcaggagaatcgcttgaaactgggaggtagaggctgcagtaagcccagatcccaccactgcacaccagcctgggtgacagagcaagactctgtctcgaaaaaaaaaaacagaagaaacgggaaacagaagtgcagctctcatagagatgctgtgacatctgggtgagttagtgcatttaggaaacaaaagaacatagcgatgaagaacccagcttctggggtaggggggtgccaagtccaagttctgctcaccacatttcctcaaacaaatgacaaaacctttcagagcctcagtttcttcccatgtataacaggactaatcaaacatcgcagcccctcctttctcactcttctggagctagaactcagacagctaatccctgagaagcgctttatccaggccaggaatagagcaagtgtgaataacattagcaaatatatctaaagcacttggcagaaaacctgccccaggccaggcggagcaggtcatgcctgtaatcccagcactatgggagaccaccgtgggtggatcatttgaggtcaggagttcgagaccagcctggccaatgtggtgaaaccccatctctactaaaaactgaaacattatatctaaaagtcaagctgggccgggcacagtggctcatgcctgtaatcccagcactttgggaggccaaggcggatggctcacctgaggtcaggagtttcagaccagcctggccagcacagtgaaaccccgtctctactaaaattacaaaaattcgctgggcatggtggcaggcacctgtaaccccagctactccagtggctgaggcaggagaattgcttgaacccaggagacagaggttgcagtgagctgagattgccccactgcactccagccttggtgacagagtgaaactctgtctcaaaaaaaaaaaaaaaggaaagaataaaggaaatctcaatgcaccaaacttccactaaatactaaaaatgggccaggcgcagtggctcacgcctgtaatcccagcactttgggaggccgaggtgggtggatcacctgaggtcagcagttcgagaccagcctggacaacatgttgaaaccctgtctctactaaaaatacaaaaattagccaggcgtggtggcaggtgcctgtaatcccaattactctggagggtgaagcaggagaatcgcttggacctagaaggtggaggttgcactgagccaagattgtgccactgcactccagcctcggtgacagagcaacactctgtcaaaaaaaaagaaagaaagaaagaaagaaaaaaaaaacacctaaaaatggcacaacacaaacaagaagcatctatctatattctctattaaaatctaggccttggctgggtacggtggcttgcgcctgtaatcctagaactttggaaggctcagctgggtggatcacctgaggtcgaaatctcgccactgcactccagcctgggcgacagagtaagacactgtctcaaaaaaaaaaaacaaaaaaactaggccttaaagagcatgcactcatcttctctcccacagacctgagagcactttctttctttttttttttttttttgagaaggagtctcactctgtcacctaggatggagtgcagtggcgcaatcttggctcactgcaacctctgcccccgaggttcaagcgattctcctgcctcagcctcctgggtagctgggattacaggtgcatgctgccacgcccagctaattttttatattttagtagagacagggtttcaccatgttacccaggctggtctcgaactcttgagctcaggcaatccacccgcctcagcctcacaaagtgctaggattacaggcgtgagccacccctcctggctgaaagtactttcatagtctgttgacatcacacttgcccaaggggaagcagaggctgatttctcaaactccctgattattagttgagacaccttccctctttgtcagtggggcaggagagacaacggcaggagaatactaaaaaatgtcccccgctttgtggcaactgtgagttcccttgaggtcaccaactacatcctaataatctgtatcaccagttgccagagtgatgcttgccccggaactgaccctttgagtgtttgttaagtgagtaattaagtgacaaagtaattcagacaagaggacctgcaacatttttcctacgatagttcatgtcatggtatgtgcagaggaaggataacccagccctcgggtcagctagtagtccccaccacccttgccagggaccccacccccataccccaattccttcagctttcccaccagggagaagcagatattcagtccgggagagcccctctttcctgagggacctgtttctttttttctttttcttttctttttgtttttttttttttttttgagaccgatacttgctctgtcatccaggctggggtgcagtggcatgatctcagctcactgcaacacctacctcccagattcaagcaattctcatgcctcagcctcttgagtagctgcgactaccggcacccaccatcacgcccagctaatttttgtaattttagtagcaacgtggtttcaccatgttggccaggctggtctcgaactcccgacctcaggtgatctgcctacctcggcctcccaaagtgctgggattacaggcgtgagccaccgcgcctggcatgggggacctgtttctacttcacaatctgtagactagtctatgggcacagttcctgagggacacctcagtgctaggctcaggagatgcgccaagcagaaaacttggccatctggcataggggagggaggatggagctcgtgaaactcacagtctcctaggaaacacacctgtgggtttccgtttcctagggctgccacaacaaactgggtggcttcaaacgacaagtaatttgttggtggtggtggtggtgttgagacagagtctcactctgtcgcccaggctggagtgcagtggcgcgatctcagctcactgcagcacccgcctgccaggttcaagtgattctcctgcttcagcctcccaagtagctgggattacaggcacacatcaccacgcccagctaatattttgtatttttagtagggatagggtttcaccatattagccaggctggtgtcgaactcctgacctcaggtgatctgcccgcctcggcctcccaaagtgctgggatgacaggcatgagccactgcacccagcttgcttgtttgttttgagacaggatctcactctgttgcccaggctggagtgcaatggcacaatcagggcttactgtagcctcgatctcttgggctcaagcgatcctcctatctcagcctcccaagtagctgagaccacaggcatgcaccatcatgccagcgtaatttttaaattttttgtagagacagggtctcactgtgttgcccaagctggcctcaaactcctgggctcaagcaattctcctgcgttggcttcccaaagtgctgggattacaagcatgagcccctgtacctggcattaacaagtgaggacggctttctcctggcttctggtggtttcagcaatccttagcctccttgggcttgtagctgcatcgctccaatctctgccgctgccgtcccgtggccctcccctctgtgtgtctttgtgtcttctccttttccatctcttataaggacacccgtcattggatttcggggccagccaccctaatccaggatgatctcatctcgagatcctccactgaattacatctttgaagacacttactccaagtcaagtcacattcacagttctggaatgtggacatatattttagggtggggcatcattcaactcattaaactgaccgagccacttcccatagcccgcagcgtggaggggaagacgcctggcaggccctggacacacaggccaagggacaggagcttgttagggcgcagggaggggctcctggagccaaggcccggggaagaggcccctaggctggagatctgggaaccactcccccacagggccatccacacacacacacacacacacacacaggcctggtgtgactggaatcgagagaacaggagagagcagggcagggcgtgtctaggaatgagacaggccaggccctgcattcctgagttggaagagaaattgagagttaggagggacaaggcctgatttgcttttaccaggaagacagagctgggacctgggttgtttgccttcatggggccccaacgttccccaggaatattatgctggacatcaatgtagccaggcgtgacacctgaaaataaaaaacactttggctcacaggggcaggttctttgggggctcatggcctcctggggggaggtcctccgtagagaaaggaggtgacctgatttgggtgctcacgggcgccccctggcctctgtgcggagaactgaccgtaggggtaagggcagagctggtggaccaggaccgaagccattcaccgcaccaccaggcaggaggtgatggggctggctggaccgggagaggtcggagcaggtggggcgaaagtagcccaggattttttttttttttttttttttgtcttgagacagagtctcgctctgtcgcccaggctggagtgcagcggcgcaatatcggcttgctgcaacctccgtctcgggggttcacgtgattctcctgcctcagtctcccgagtatctgggagtacaggcatgtcccaccacgcccagctaatttttgtatttttaagagaggtggggtttcactatgttggccatgctggtctcaatctcctgacctcaggcgatccacccaccttggcctcccaaagtgctgggattacaggcatgagccaccgcacctggctgattttttttttttttttttggctttgttttgttttgtttattagagacagggtctcattctattgcccagcctggagtgaaatggtgcgatcatagctcactgcagcctcgacctcctggactcaagtcatcctcttacctcagcctcccaagtagctgggaccacaggcacgcaccaccacacccacccaagaatacatcttggggccgggcacggtggctcacacctataattgcagcactttggggggctgaggagggcggatcacttgaggtgaggcgtttaagaccagcctggccaatacgataaaacatcatctctactaaaaatacaaaaatcacccaaccaatcagagagctcactaaaatgctaattagg

SEQ ID NO: 2146 - DNA, 2292 bp, Homo sapiens
ctggaagcttccgccggacgggtatatagagtccgggactggtcggcggcggagccgggggacggcgacagcgggtcggcgggccgcaggagggggtcatgggtaaagactactaccagacgttgggcctggcccgcggcgcgtcggacgaggagatcaagcgggcctaccgccgccaggcgctgcgctaccacccggacaagaacaaggagcccggcgccgaggagaagttcaaggagatcgctgaggcctacgacgtgctcagcgacccgcgcaagcgcgagatcttcgaccgctacggggaggaaggcctaaaggggagtggccccagtggcggtagcggcggtggtgccaatggtacctctttcagctacacattccatggagaccctcatgccatgtttgctgagttcttcggtggcagaaatccctttgacaccttttttgggcagcggaacggggaggaaggcatggacattgatgacccattctctggcttccctatgggcatgggtggcttcaccaacgtgaactttggccgctcccgctctgcccaagagcccgcccgaaagaagcaagatcccccagtcacccacgaccttcgagtctcccttgaagagatctacagcggctgtaccaagaagatgaaaatctcccacaagcggctaaaccccgacggaaagagcattcgaaacgaagacaaaatattgaccatcgaagtgaagaaggggtggaaagaaggaaccaaaatcactttccccaaggaaggagaccagacctccaacaacattccagctgatatcgtctttgttttaaaggacaagccccacaatatctttaagagagatggctctgatgtcatttatcctgccaggatcagcctccgggaggctctgtgtggctgcacagtgaacgtccccactctggacggcaggacgatacccgtcgtattcaaagatgttatcaggcctggcatgcggcgaaaagttcctggagaaggcctccccctccccaaaacacccgagaaacgtggggacctcattattgagtttgaagtgatcttccccgaaaggattccccagacatcaagaaccgtacttgagcaggttcttccaatatagctatctgagctccccaaggactgaccagggacctttccagagctcaaggatttctggacctttctaccagttgtggaccatgagagggtgggagggcccagggagggctttcgtactgctgaatgttttccagagcatatattacaatctttcaaagtcgcacactagacttcagtggtttttcgagctatagggcatcaggtggtgggaacagcaggaaaaggcattccagtctgccccactgggtctggcagccctcccgggatgggcccacatccacctccagtccctggccaggggtgagaggcagaccagcagatggacttgatccctctgtgtctttttgcttctggctggtagataatgtcaacctgcagtcttgattcccagaccctgtacactcctccttttctgttgtgtgatcagtttgtgctttattctgtatttgtctcccatgtcttgctcttctcctggagaattctgtcttctctttggccatctcaaattgagaacctaaactattcctgcagaactgcctggttggcgtccacaagcaatacctctcgttccagcaggaccaagggagccagcctccagtgagtgactccagcaagtgcagccacctctcccttgatggtctgggagcctggcctcagcaaggggccttcctgacctctggctccagtgaagctgaatgtcctcactttgtgggtcacactctttacatttctgtaaggcaatcttggcacacgtggggcttaccagtggcccaggtaattttttgtttcatggactatggactctttcaaagggatctgatccttttgaattttgcacagccctagatacaatcccttttgataaaagggtctttgcttctgattacaggagcactgtggaacgtctgtaaatatgtttttataattccatgtatagttggtgtacactcaaaacctgtccccggcagccagtgctctctgtatagggccataatggaattctgaagaaatcttggggagggaaggggagttggaacaaatgtctgttccctggaggccagtccagtgctcagacctttagactcattgtaagttgccactgccaacatgagaccaaagtgtgtgactagtcaatgaagtgcgacagcattaaagactgatgctaaacctca

SEQ ID NO: 2147 - protein, 338 aa, Homo sapiens
MGKDYYQTLGLRASDEEIKRAYRRQALRYHPDKNKEPGAEEKFKEIAEAYDVLSDPRKREIFDRYGEEGLKGSGPSGGSGGGANGTSFSYTFHGDPHAMFAEFFGGRNPFDTFFGQRNGEEGMDIDDPFSGFPMGMGGFTNVNFGRSRSAQEPARKKQDPPVTHDLRVSLEEIYSGCTKKMKISHKRLNPDGKSIRNEDKILTIEVKKGWKEGTKITFPKEGDQTSNNIPADIVFVLKDKPHNIFKRDGSDVIYPARISLREALCGCTVNVPTLDGRTIPVVFKDVIRPGMRRKVPGEGLPLPKTPEKRGDLIIEFEVIFPERIPQTSRTVLEQVLPI

SEQ ID NO: 2148 - DNA, 2137 bp, Homo sapiens
ctggaagcttccgccggacgggtatatagagtccgggactggtcggcggcggagccgggggacggcgacagcgggtcggcgggccgcaggagggggtcatgggtaaagactactaccagacgttgggcctggcccgcggcgcgtcggacgaggagatcaagcgggcctaccgccgccaggcgctgcgctaccacccggacaagaacaaggagcccggcgccgaggagaagttcaaggagatcgctgaggcctacgacgtgctcagcgacccgcgcaagcgcgagatcttcgaccgctacggggaggaaggcctaaaggggagtggccccagtggcggtagcggcggtggtgccaatggtacctctttcagctacacattccatggagaccctcatgccatgtttgctgagttcttcggtggcagaaatccctttgacaccttttttgggcagcggaacggggaggaaggcatggacattgatgacccattctctggcttccctatgggcatgggtggcttcaccaacgtgaactttggccgctcccgctctgcccaagagcccgcccgaaagaagcaagatcccccagtcacccacgaccttcgagtctcccttgaagagatctacagcggctgtaccaagaagatgaaaatctcccacaagcggctaaaccccgacggaaagagcattcgaaacgaagacaaaatattgaccatcgaagtgaagaaggggtggaaagaaggaaccaaaatcactttccccaaggaaggagaccagacctccaacaacattccagctgatatcgtctttgttttaaaggacaagccccacaatatctttaagagagatggctctgatgtcatttatcctgccaggatcagcctccgggaggctctgtgtggctgcacagtgaacgtccccactctggacggcaggacgatacccgtcgtattcaaagatgttatcaggcctggcatgcggcgaaaagttcctggagaaggcctccccctccccaaaacacccgagaaacgtggggacctcattattgagtttgaagtgatcttccccgaaaggattccccagacatcaagaaccgtacttgagcaggttcttccaatatagctatctgagctccccaaggactgaccagggacctttccagagctcaaggatttctggacctttctaccagttgtggaccatgagagggtgggagggcccagggagggctttcgtactgctgaatgttttccagagcatatattacaatctttcaaagtcgcacactagacttcagtggtttttcgagctatagggcatcaggtggtgggaacagcaggaaaaggcattccagtctgccccactgggtctggcagccctcccgggatgggcccacatccacctccagtccctggccaggggtgagaggcagaccagcagatggacttgatccctctgtgtctttttgcttctggctggtagataatgtcaacctgcaaactgcctggttggcgtccacaagcaatacctctcgttccagcaggaccaagggagccagcctccagtgagtgactccagcaagtgcagccacctctcccttgatggtctgggagcctggcctcagcaaggggccttcctgacctctggctccagtgaagctgaatgtcctcactttgtgggtcacactctttacatttctgtaaggcaatcttggcacacgtggggcttaccagtggcccaggtaattttttgtttcatggactatggactctttcaaagggatctgatccttttgaattttgcacagccctagatacaatcccttttgataaaagggtctttgcttctgattacaggagcactgtggaacgtctgtaaatatgtttttataattccatgtatagttggtgtacactcaaaacctgtccccggcagccagtgctctctgtatagggccataatggaattctgaagaaatcttggggagggaaggggagttggaacaaatgtctgttccctggaggccagtccagtgctcagacctttagactcattgtaagttgccactgccaacatgagaccaaagtgtgtgactagtcaatgaagtgcgacagcattaaagactgatgctaaacctc

SEQ ID NO: 2149 - protein, 338 aa, Homo sapiens; identical to SEQ ID NO: 2147

SEQ ID NO: 2150 - DNA, 21517 bp, Mus musculus
  misc_feature (1)...(21517): n = A, C, G or T/U
aacagctttctcagtgaccatgaggaagagcagaacttgataggcatagaatacagcttccacacagacagccccctcagcgaaggtcctccaatacctgcccaggacccttccatggatgtcacactcccctcctgtcacatacatacccccaccaccttagtcacgagctactgtctgtccctccccagaacctgcaggggtgctgcatgctcccagcccctctgcctccctgtcatcccacaccttttccccaaagcaagctgggctgggtcaagagaggacaggcatcaggtgggatctgtgaccttcctcaacactcacggggagccctggttccccttcctcttaggcatttcccagcaccaggcccggctaggggacgggcaggactcaacaagagcctgcccctcactgtggctgcttgggactccacgggcccaggggtcttctggacccctcccaccatcccccagtgcttccatgtctccaaaagcgccttcctgtccctctcgtctgtccctgcaccttggggctggggtaggtggggccaagagggactgtctactttacaaactgaggaaacaagcccaaaaggcttagagaaactctagaactgaccctctgtgacagcctccatcacgccccttttagtcccaccctgctctgcctctgtgggccccctcagcccaagaggtcattccaagagagcagtgctcctatgggcaggtgagggtctcaggacaggtttccagtctggcagaatttgtgggtgtgcgtgcgtgcgtgcgtgtgtgcgtgcgtgcctgcgtagagtgtttgcttttaaaaacatgaagatcaagaggcagcaagaccagggtcggaaccagggagcaggctgggagactgctgcccttctcccatccgaccctgggcagggctcccagcccccaccccctgtacataactttttgaaacatttttttagcgaatgaaatattgaagtataagatttccttttatttttcaaatcaatgggaatgtgtctgaggttccctgggtccctgggctgtggaaggcaggatgcagggaagactgaatgtgtgtgtgtggactgtgggtgcatgtttccacaggggcccagtcccagtgccccaggactcctgtggatccaaccagcttcctctcccccgggactaaagttttagggtgttcacaggtcccagttagctgagcccactcctgggggatgaggcagggcagggtccgcatccattgttactggtttgcggagcttttctctggccgcactcctttccactctagctctccaggagcagtcttttgggtgtcttgagtttgacatgtgagcacagggtttctgttactcccctccattaacgtcctttcacatctcactggttctgttctagccctgacctctcccccctccccaactctgcattctagctgccttttcagaggcaggggtttgcaggattggagaaggtgggatggagccttttgagtcagatctggagacctgtctccaggccagcagcaccctctaatctgccatgatccctcttaacatctgatggtgtgagggtggggtgttgggtctgacttggcccccagtaccttagccctgggtggccaagtggaggggagtagacatccctagctaaagcacaagcaccttagtcataccccctccctccgccctcgccctggcctgttacccacctcccccagcaaagatcccaaagcacaatctcctgataacttggcgagcagctgagcctggcagggatgagcgcaggctgtgctccctgcccaggtttagtaagggggcagttctgtggggcggagagggcttgtagagtgggcagcagagcccattggttccaagcacctcaggaggtggccctgactcccggggcttggggtgagggaagtataaagccaggggtgcaggggagaatactactcacttaggagagccaaagacagggttgtgccttacctcaggagccacccctgcacccctcctctggcagtcagctgcttgccctgccctcctgagagctgcatggtccccaccccaagcacccaggagagtaaaaaagtaacccacttagcaggaaagacaagtaggggcaaacccagtggctaccctcccacctatccatgcctctcatggggacaggccatcacccactggcccatgtgaagtgccaatgccctccccacccagagccgagcccccacccttcccaggcccacaagtgagattgcacattaactactgtatggagaggagcggtgttgggaaatgtgaaccctgagagtcagtgatgctgataagaataaacaagacgcctttgtaacagccctgctgtgctctgctcactggagagggacatgctaccctactcatataggtgcacacctgcctccttgtgttagagtccttgtgctgcccctaagctgcaccccagcctgagatcactagtgcaactaggggtcacacaggcactccatgataaaccatgtagacagcagtaggtcctaggggcccaagaatggctggaagaacaggagcatggagaatggaggtggctcagacccaggagtgaaagctagaagattgggagttgagatacatggcaagagaggagcctgggctgctcaagagctctcaggtctcaccaggtcactagccttcattgcagtcagacaagcccaagccctgcccctctaaggagactgactgggggtatattcctgagaagaaataagcactgagttcttaataaacaggaacactttggattaggaggttagtttgatttgtggtttatgaagcggctgggctaggactcttgcctccaccttccaatcctgtatatttcacggagaggcagagcctttgttttggtatggtaaaacgaagcccagacctcagaaccaagggttggggcaagtaaggtggctcattaaaaaaaaaaaaaaaaaacacattgcaagcctaatgacggggtttaggaccccaaaactcatgagaactcacctaacaaagctgttagctccctcccatacagcttatggagcacacaaatattaacaatagaatttttataaaacaagaacaaaatctgtatcaatacttgagatattagcactgaaattcctttgttttgtttttcgagacaaggtttctctgtgtagccctggctgtcctggaacttactttgtagaccaggctggcctcgaactcagaaatctgcctgcctctgcctctgcccgagtgctgggattaaaggtgtgtgccaccacaccctgctagcactagaattaactaacacacacctgagagccacttgagagagccctaagcctagagaagctaccgaaaagatgaaccaaagtttgtcagcactaatggtacaaatacacattatttaaatgttgggattttaaaaatttatttattatatataagtacactgtagctgtcttcagacacatcagaagagggcatcagatctcatggatggttgtgagccaccatgtggttgctggaatttgaactctggacctctggaaaagcagtcagtgctcttaaccactgaaccatctcaccagccctgggatttggtttctttttttttaagatttatttatttatcttctgtatgtgagtacactgtggctgtacagatggttgtgagagttcatgtgattgttggaaattgaatttttagaacctcttctcactctgggtcggctgctcactcagtccctgcttgctcaggcccaagatttattgacactgtagctgacttcaggcgcaccagaagaaggcttcagatatatggtggttgtgagccaccatgtggttgctgggatttgaactcgaccttcggaagagcagtcagtgctcttaccgctgagtcatctcaccagcccagggtttgatttctattgtcatgtattaggcatgggggtggcagtggggcagagcttatcagggtcttcccacttcacccttgtaggagcacttgaaaccagacctgtggaggaagctaggtttcagcccaaggcccaaaggtcccactaactctggaagacagccttgggtcagttccccacactccattcccccttttcagtaggcaggacagtccaggccatagagtagtagacccaggaccaccacaatggcagaccactgttgtttgccaaaagtcaaggaggcacagtaccagcttcttccctttacctacccaaaaagaacttaccactcgtcatatgggacacttccatcttcctgaggactcagtccatctgagactatctgatctctccagttcatgagtaaaagacatccagcatgctaccaataccatggtgaaatggtagcccctgtgcaccagagaagtcaagggcaccaagccctggtcttacatgacctgatgtttttctgaacctggatgctctcagataccattttcagctgttatcctgatggtccatgatcaactgctgaattggaggaacagcagctaacatacctgagggttttcacctcaccctgccacacctccccatccacaaacctgctgggtggcttgctcttcaagtagcaagagcacactgaggtttctgagcagctggcaaaatcagggcagggcactgactcaaggcagacccagatgagtttgtagcagacagggtggagtgactataatacagactggtgtgggctcagacctgccaccaacaagggggccattccactcagcatgcttccgtttcctcatggtttgctggtttattttgagacatgatcttactgtgtatccctggctgtcctggaactcggaacctctgcctctgcttcctaaagagaaatgccacccagcttaagagagacatacacctcgttcccagggttggagtggggagtattaaatcgaaaagaacacctagaataggacttaacaacaggaactattgacacaccttggttctctttattgtctttacaacatttaccttgtgtgtatatatacactcacatgacaaggcactttaccccggatactactgcaccagtccttccatgttaatggcaatctatagtctagccttcaacttaaaatattcccaccttaaccttagtcttccattacatggggttttaagtgtctaccacttaacctggttttgggtttgtttgtttgttttttgggttttcgagacagggtttctctgcatagccctggctgtcctggaactcactttgtagaccagactggcctcgaactcagaaatccgcctgcctctgcctcctgagtgctgggattaaaggcgtgcgcaaccatgcccggctggttttggtttttaattctagtttttaattctatgtgtacaatcacacttcatttaggctttgagattttttttgtttgtttatttttaagacagagtcttgcattctcagactccttacatagctaaagatgaccttcaacttctgttcctcctgcctctacctcctgagtgttaggatatcagttatagaccaccacaccctattatgaactagtaagaatcaagcctgtggcttaaaacatgctaagcaagcattctatcaactgaaccaggcatggtatacagcatgtggaaggctgaggcaagaggattgctcgagtccacagccactatggctacagagtgatccacagcctggatcaagacttaaaactctgaaaccttgtgcccagagaaactgcaagggggaggtcttctggacattcctggtcccttgtaatatcccagagcccctctgcttctcaggtggaggaggtgttatgaagccaggggatctagtccctgatactgaaggttggatggctggagttgaccttgggctaggtcctgttactatttctgcaagaccttactgtattttatttagttggtagggctatgaggtatgcctggagtggagggtatttgatggtacaacttcacgggacatgatgttgggggacaagatgtgggagttcttttgttttctgagggtttctctgtagctctatctgtcctggaagttcatctgtagaccagactggcctcaaactcagagaaaggtgtgtgccaccgagctatgaagatggctccaaggtaaggacaccgacaccaagcctaacaacctgaggtgaatctctgggatccattgtgtaaggagaaaatcagttctcctaagatgtcccttgaccacccccactcccaccccccaccccccccacacacaaactatataaacaagtaaatgtaaaactcatctgggcctcctgcatcagcctcaggttcctgaattacaagcattagccacctcaccatgaattttgtttgggatagggtttcaccatgtagtcctgaatggcatggaacttgctatgtagaccacaatagctttggaactctgcaatcctcctgcctcaccctcctggatgctggaattagaggtataaaccaccatgcccagttgaccatagactctccttatctctagatgacccacatgcattgtggttaacaactgctcaagagcattgctgagacagcaagtacatcctttacttccaaatggttttatgcactaagaccttaagtgtaaagaggcggtggtgacacatgccttaatcccagcactcgggaggcagaggcaggcaggcagatttctgagttcgaggccagcctggtctacagagttccaggacagccagggctatacagatacagaaaaaccctgtctcaaaaaaccaaaaaagaaaaaaaaaaaagagtctagagatcttaacacaagctaaatgtggtatggcatgatttaatcccagcgcggaagaggcagaggcaggtgaatctcttattccagtccagccaggttacagtgaaaccctgtctcagaaacaaacacacctgtacccagcttcacaagataccctaatctcccaatatatcctattcggacttcacctgtactgtttcccacatgctctctgtgaacacctttctgtgaaacatcaggtccccaatagggggcttgaatttgcctggattgcctttcactatgccatgtgctgagtcaagaatcaaggccagagacgtacaaacttcccccagcgtgcacattcctccagacttcaacacttctaagttgaacagcttctttaaagggctggctcccacaaccccttaccgtggccacaggctctgccttgccacctctctaaagctccaggatatagtcgtttcttccaagtcgcagaggtcccaatgatgctactcaggctattccgcagctcagtcgagctctttccgaccactacagagtctccctgcaggggctcgcaccagcgctggcgcagcccacagaccatattcacagctttctgcacttcactgctggagcacgactccaggcagaggtcccaaaccaaccgagatccagacatcccaacaaataccctttcactccactacagggagacccacgcactgggtggcctacaccttggcactgactagctacgagacggctcccttccaccctttccccgacaccgtcactcaccctcggactacaaaggatcctagagagacacatcatcatcccctcctccccgcagctcgaacccccaaccagcaggagcagactaacttgttccctagcagaaagcgatacatggtgccaccttcgcgccagggatgccaccatcgagagcccgaccgccaaaaaagaaagagcggcgctagagggcctaagcgtgtggacttccgcctgcacctcggccatcttggttgtgggcatacacatactggcctactacaaaactgggtcggacctcaactgtggaacctcagtttcctttttagccaatgtcaataatcttgcttttgtgtaactcttatgggatgacagcgggatacggaatacattaattagctagctcagcggttgtagctgagcacggtggctcacgcttttaatcctagcactagggaggcagaggccagccttgtctacaaaatgagtcctaggacagctagagctacatagtgagaccctgtctcaaaacaaacaaaatatgattgctgttctcagagaacacaggttcgattcccagcgcccacataactgacccaatgtccggagatccgatgccctcctctggcacaggcatgcaagcaggtaaaatacaaaaagaaaaaaaggagaaaagaaggagaaagaaagaaaaaacactcagaagcagtgcaggacagctgaaactataaaggtgatatcttgtttcaaaaacaaaaaaaaacaaaaaacaaaaattaataaaaggccagcaaggtggctcagcaggtaaagggacgtgccgccaacactgagtacacgggtagtttccccaggaagacgggaagaaagaacagcccaagaactgagtactttgtcctctacatatgtgagtgcaggagggtttcgaagatgtttttccgtaactccacagggtgcgaatctcactccacccggactcatcccgcatgacggtgccgcagcgtgtgagagcatgagagaaggaaacatccagttctctccgggacgccgtgcagactgtccaaagaactgtagcaccaaacagactcgaacgacccgagacaacacttagttaggctcctgagggctggattggaggggcgtgctcgccgatggaaggggccccgccccggaagccctctcctcgggctaagaccggctgcccttgttcttatatgggcatccggaagtggtttgcggcgccaacctacgtcattacatccaaatttagccagggaagtcggccggctgcagtggcgggaagtctgcccgctggcagggggtgtttcttaaagggcctgcacagcaaatgaaaggggttatttgaatttttctcccttctgcaactagaagcaagtttttcttgggaagtgatgcaaagtggaaccgacgtctttttttcttttctttgttactgtgtgtgtgtgagacatcgtatagaagtctgttctcttgtaccgcgtgggaccggtgggaccgggaatcgaactgagttcgttaggcttggcaacaagtggctccacccactgtgccatctcgacccagatatctgtctttcttggagtaattccgttcacgagggcatgaaggcagaaaactgctctattgacaagggaagatcgcaggccctatggacattgggacttccatgccactgggttgcggaaaactgggagatctttaacgctgaaagtaaagagcagtcgtgaggtgatggatatctgtggttacagggtacagtgtccgtgcccactttccacccatgtccagaaaggtggagatagaagggctgcaggctttagttgatcctttcgccatagtataatcatataatcattcgtttagtaaatattggtcaggtggctgcctatttctcacctggaaaactgtatcttctatggagtggaggtgagagatgagagacattgaataaaaagagaaagttcaacactgtagtaactggcgtgtagtaactgcttaataagtagcagcgtttttactgttcaaaaaatattaattagcaggctggtaggcaagatgaatgccctcggggaatgtaccccggtcccgggttttccccactgcagtcagattaccgcccactatccgtctcgttggtgggcctcatcctctggcccgttggtgactctgagaacccagaacttagtgtcttaaggtgcagtggggaagttcttccttgccagaagttaagtcctttttccttcgaggcgtaaatttatccctattgctttaaggactcgctagccactgtggaaagcccggatgaggccctctggttgggcgtggtgttgcagtgacgtcactctcagtatattaaaaggctccggcttgctgccctcgcccgaacgtctagcagagtacctgctgctgtaagcttgtcgtctgggctgcaccgcccgtcttaacccattctcgacttaactactctcgtcgaacaagcatggaagtacagaaagaagcgcagcgcatcatgactctgtcggtatggaagatgtaccactctcgcatgcagcgaggtggcttgcgactccaccggagtctgcagctatccctcgttatgcgcagcgctcgagagctctacctctcagccacggtagaagcccaccagcccgagttcccgccatcccgcagggctcttgaccctcgcctgcacccgccgcgggaagccgaagttgcagtggaagtagcgtcccccgaagccgtgcagcctccggagcccatggatacgcaagaggaagtgctgcgagtccaggagacccctgcgctctgtgacccgccccccgctagagtcagccgcaagcgccggagcagcagcgatttgagcgacagtagtgatgccggactggtaccaagcaagaaggcccgtctagaagaggtggagggggaggcgacgtcggaggttcccgatcgcctgcagcttcctccggcacaaagcgaaggtgccttccctaacctcgcccgcgtcctccaaaggcgcttctccagtctcctgaactgtggacccgccgtgcccccgccgacgccccccacgtgcgaggccaagccagcctgccgcccggccgacaatatgctcaacgtgctggtgcgagctgtggtggccttctgagagctctggtggcttctttcgagcggcgccaccggagcggagaacgcacacccgaggcgaaggccggcgggggccgtgaagaagagccgcggcccgagctgccgagaggccaggggaaggactgaggagcgaggggcgcgggcgccttctcccagacgtgcgtccataggtgctattaaaggactgtcccttccttggcttggagaagggacacctagatcttgaatctcagggtcgaactctctaggggccaggctgccctttcaaggccgtttcactaccattcgcgtttcggcccctacaagtgggcacgcttgtgcaagcggtcagagttgcgtcatgggacagacgcgggtgcttcctgttgccttgcgtgggtgtggggcctgggaggaggccagggtgtggacccgccctagggactgggaagtgacttgagtcacctcgcccccacaggctgctgtgggtgagcctgaactgaaccaatcaaatctgcgatcagagttgaagtggctggagaccccgggactggtcaacctagatgatcgcctggcgtggaccaccgcgggacgggtgggccgctggtcgtagttgctgccgtagacacagcttcttcgggcaggaaagaaaattttttttttaccagcgtgtttaagaaagtctgtttacttttcccacggtgggttgtttaattagcaactacctggagttttacaatgtcagctaggaaaataaagaccatcggtgtaaaacgcgcggcttgtctggcttgcttccctggtgggggaggggtggggttaaggggtcagccgctccctaagcctccggaactggtttgactgggtgcggagccagagggaggccgggccccatttctttgccacaagtttacctgcttaagctagccctgtaatttgggagtgccttagaaattaacaaactctgggggaatagtgtgtggaaagcttagtttacaattggggaggggggtattgggtgcagtgtttcaagaagagctgaggaattttaaatgatggcgtttctccccctcgaccggaattgcgtagggcccccacgggtagagtggcggtgactgaactttgaacctgcgttcagccccttacacgatttctttagtgtggctcaggcagataattgagtgctaacttaagttacctgtctatgaaatatccctaagacgagcataatgcctaaagccctcaatgctatcactggggaggcagaagtagaaggttcgaggccatcctggtctacagaacgagttccaggacagccaaggctacacaagaaaccctatctcgtaaaaaaacgaaataaatgaacctataaaccgcttcctcagaacacttaggttttaacagtgttaacgctggtggttcacgtttaattcaacggggtttcgtgggtagaccagctcaagaaacagcaagtccctaaatgttttttggttttttaaatcgggcagggtgctgcgcacctttaaatcccagaaagaggaaagcagaggcgcgtggctctccaagaagccaggctagtttcccatccatctgcgggttatccaaccagagagaatttctctcactttggtttccgacatgctttaggcataacctgggaacgagggtaggagggagctccaggctctaaggacaaaggaaccgcaggtgcaggaagctcaaggaaagcgcccgacagcagtccccgcctcctccggcctcttttgaccctagggcggagagctggagggaggggattgctcctagaaagtcccagcccccagcttctccctcctagaaagtaagggttctgcactcccaggagacccagccgagcctctaccagaactgatattttcttgaaaacgtggaagatccctagcgctgcccactttgtctagacgctcgagttctcgtggaacttggacacagaaacgtggccaggcctgggaagtccctggtggctagggagggggcctcggtgtacatcctgtcccaggaaccgtggggcccttccttcccagggaggtggtttgttcaacccataccaggacttccggtgccgcagtcactgtaggatgaggactgaaagcaagtcttcagctcctgcacgcattctcgcaggggtgatgagctacatgaaaaactgtcacagtcacagcctggactcccagcacttgagaagctgaagcaggaggattagtaaattcaagtccagcccgggctacacacgaatctgtctcataattaaacagaattaaatagggtggatgtggtgcgctccccccccccggaagtttaagatcattcttaactctatagtttgaagccaacttagattccgtgggacctcgaagacaccttattactgagggaatgatgggtgggtaaagcttacagtttgagaagaactgctagcttccaaagcgtcctgggaaaaattactgaatcaataaacagccttgaatcagaagccagcagtgctgataagggaggcgctgaagcccgggttccatcttaaaaaaaaaaaaaaatccaatacagtgtatacaaggtctggaatcagctcttgggtttcaatagagactctttgtatttactgtggaggtgtatgtgtgcatactgggaaatactgtctcctgtgccccaggctattctacaactttaggatggatgaccctgagctggggcttctgcctcccttgattaaagtgctctgtctaggaatgggactgggatgcaggcccaccaatatgcaaacactgttgactgacccatctccacccaaatccaaattgtgcaattctaaatggatagaatcactaccattactgtttcaaagtctcccaaccccgataacactctttccttcctctccccagccttcagccaccaagagtctactttgtgtcttgcctgttgtagacagctcaagagaatggaagcactcaccatgtaactggcttatgtcaggcttcttcctgtctgaatcatgtctgccaggttcatcaatgctgtagtacatgaaagaatcacttacttctcctgtatcttcatagtactcttatgtataaggtccacattcattacccatctacctgctggtgaatatttaggtcatctctactgcgacctaaatattgattgagaatgtgctacaggcatgtgtgttcaagtgtctgtataaatgtctgcttttaaatccttttgtttgtttgttttgatttttttgagatagggtttctctctgtgcagccctagctgtcctggaactcactctgtagaccatgctggccttgaacttagaaatccgcctgcttcacaagttaggcagaggtaggagttcgaagccagcctagtctacagagtgagttccaggacagccaaggatacacagagaaaccctgtctcggaaaaaaaaaggatttgtccttttggttttcttgggtgcttgctgttgtgttttgtttttggaaatcaggtctcaagctattaagtcacagagatcagtatgactataccttttgacttctgggattaaagacacgggccactctaatttgtttggtgtttttcttgtggccattgtttttttttttttttttttttttggaaaaaaagacctcactgtgtagctccagctgacatggaattcctatatagatcaagctggccttgacctcacagaaatcaggcaaccttggcagcttttaagttggctactgctctcaattctgaagtccttttgttttgtatttgaagtatggtgtcatgtggcccagcgtggcctcaaattcactatgtagctgaggatgaaattcaacttcttttcttctttctcactgcctccgcttcctaagtgatgtgttttataaagttaaggctatgttttgtagagcacggtatggtgtggtgggagggggtgcctcagtgggcccatgctaagtcatcccattcccccaccagggtactagctttaggggcatgggaagcagggttaagaagggaatagaggtaggaaagagaggggacagaggagagagacagagagagacagaggtattctccagaaacacgtggagagaggggggagagggaaaagggggtcagagagagaaaaggggtagagagtcagagagggagaggacaaccaatcccttttatagcaagccagacctacctggctgttgctaggtaacagttgggcggagcagagaaggaatgccagctcctgtgaccaagaccatgcatactaggtaagccctttatcctttgacatgttcggccccctctcagttcattgagatgccacggatagaacccaggactccccacattcaaagtacacctccagacaccttattttattttacttttttgagatcttggcttactaaattgtccagggtgactctgaaccaccatgtagcataaacaggccctgaacactggttccttctgcctcagctttcctagttagctaggattagtggtaagcaatcaccacacaagagtctgacattcatttcagttattattgtttcatgtgtatatatgtgcctaagagtatacatgtgcactgtgcacttgccagagttctcaagtcagaagagacatcagatcccctgaagtgaaataaaatgtgaggcaaacacttgtccttatcagtagcagtaaaagctgcactcttatctctcccagctcctagaagtttgtttgttttgtttctgagacaaggtctatgtaacctgtctctgcctcccaagtgcaggggctaaaggcatgtgccaccactgcccatctgttactgttcttttttttttcttaagaaaggagtaaattggggccctaggagggtctacatgcaatataccaaggaacagacatagctcccccacccctacacgtctcaatggacaggtagcacccaggtcagcttccctgggaggggcaggccacaggccatgactagtctgaagcaggaagtgtccagaccggtttccagggctcttggactctggcactgccctgaggcagggagactgcagaacctggcttagcagttcgcagggtggagccaggacttgactcggcgaggaaacgagtcagaggcggagttccggagctcactagcctagcggaccaagtctagggggcccgattacgtcaatcagagtcagggtgggacctgcagacttcgctcctgcgtgcagtaacttgcttcttctgggaactcctggcttctgcctccgcgacggcccggggattccccacttgccagcacgccacaaggtcccgagagtgggctctgttgcagcgcgggaagaaggacctggaggccctgggcagccaaaggtggaatgcactagcttgcaggagcgtgaggctcagatgcctcacgttgctttgaagtctgctaacgcttctgcctgtatctggataattccagaatgtctcgtctgactctgaggaaggctgcttccacactccctcttagagtttacccagttgcctgttaagctgagcttgggtctccttaaaatcgtaaacagagaagcaaaagccacatatgtcctgcttctgccaggtccttccaggagcctacttctcagttcacggccccttcctgcgccccctttttccctacagccttcagtttcctggcctgtgggcctcaaagtcacccctcctcccggctaagaatctgggcacttggcgacccctcccccagggccctgcctttccagcccgccgccacccaactggcaccaattaatttccaccccagtctgtccactcacatctggccgccagctgctcgccctagccctgcgggtctctggggggctcccagagacgctcgcagttcttttcctgagcccacccacgagcccagaccaccccaccgagtcagcagatttgaaaaggcttccaaatgtctgaagcaaagatctgaagtcagaccgaagaggatgcgcgaagctttcggacccacaaatgtatggtgggggaaggaagaagataggttctcccaggtacctgaaagccacagaccaaaaccttctggcttccagatgggaactgagagagtgctcctccaactcatcagctccctaggaccctgaagtgacagccatgcccccccccccaagccccatccccgcctccccaagcccactccaggctgccgagtttccttttcctgtttgccctccccaagggttggactagagagagcgccgggcccctttgaaggggctcctgggagggtcttccaggaagagggggaggggacagactggagaacaataagacctctgtggctggccagtggggcgccagttgtatcctgttaacccttggggagcccctccaagccctggcctctttggggagtggagggtgctcttccatatttagtttgtgaaagtgttcaggacaaaggtgtcctgggttaactggattgccttcctagcttggagcaggaatgcaaatcacgcaagtgcctgcacagggctggatttgtagcctgagttttagtgcaaaaaatcgggaccttttatttgcaaaaggccaggctcagccacctgtctcaatatgccaattaaactaatgagtaggggtttagagacggtccatcgtgcttagtgtgcaagcatactgatatgagttcaaatcccagcacaatgtaaaaaacagggtatatctgggaaaaaaaaaaaaaaaaggcaggatgatctctggggctgactggtagccagcctagcttcaagttcttgtgatactgttgcaagaaaacaaggccagagtgatagaggagggcactctacttctctagtctctgggtgctttgcacagtgaccacatgtggagaagggatttaattacctagaaccctaaatttatctgagattatagacatgagccaccaggcccagcaaattttaggattaagtacaggaaaatttgaggcaggggaaaagagacgtgcctgatggggctgttctggtccttattactttagccggcaggggtgacgacacatcaagcccagtggtgacacatccatacaagctcagtgttgcaggctacatgaagggcaagtatctaggttcttgtgtcccaggtccaagtacacaggttagagagagaaaccaagacagtttatgaacaaaaggccagcagggattccaaagatggcttggggagggacatcagatgctctcctagagggcatgcgctggggtcacttgctagcccaaaacggtctgtaactctagctccagggggatctgtctgtcgccctcttctgggccccgaggttacctacacagcctgcaaaaacctacccacagacacatataggcatatgatttgaaaatcccagcacagtagatctctatgagtttaagaccagtctggtctacatagcaagttccagatcagccagaactgcataatagagaccttgtctcaaaaataaataaatagccgggcatggtggcacacgcctgggcacctgtgagagacccagtctcaaaaaaaacagaaagaaggctgggcggtggtggcacacacctttaatcccagcacttgtttggcagaggcacagcctggtctacaaagtgtatagccagggctatacagagaaaacctgtctcgaaaaaccaaaaaataaataaatacatacatacatacatgaataaataaatacatacatacatacacgaataaataaatacatgaataaataaataagtaaggggctgaaatcttcctgccaagccgggcatggtggcgcacgcctttaattccagcactcgggaggcagaggcaggcagatttctaagttcaagtccagcctggtctatagagtgagttccaggacagcnnnnnnnnnnnnnnnnnnnnnnnnnnnnnnnnnnnnnnnnnnnnnnnnnnnnnnnnnnnnnnnnnnnnnnnnnnnnnnnnnnnnnnnnnnnnnnnnnnnnnnnnnnnnnnnnnnnnnnnnnnnnnnnnnnnnnnnnnnnnnnnnnnnnnnnnnnnnnnnnnnnnnnnnnnnnnnnnnnnnnnnnnnnnnnnnnnnnnnnnnnnnnnnnnnnnnnnnnnnnnnnnnnnnnnnnnnnnnnnnnnnnnnnnnnnnnnnnnnnnnnnnnnnnnnnnnnnnnnnnnnnnnnnnnnnnnnnnnnnnnnnnnnnnnnnnnnnnnnnnnnnnnnnnnnnnnnnnnnnnnnnnnnnnnnnnnnnnnnnnnnnnnnnnnnnnnnnnnnnnnnnnnnnnnnnnnnnnnnnnnnnnnnnnnnnnnnnnnnnnnnnnnnnnnnnnnnnnnnnnnnnnnnnnnnnnnnnnnnnnnnnnnnnnnnnnnnnnnnnnnnnnnnnnnnnnnnnnnnnnnnnnnnnnnnnnnnnnnnnnnnnnnnnnnnnnnnnnnnnnnnnnnnnnnnnnnnnnnnnnnnnnnnnnnnnnnnnnnnnnnnnnnnnnnnnnnnnnnnnnnnnnnnnnnnnnnnnnnnnnnnnnnnnnnnnnnnnnnnnnnnnnnnnnnnnnnnnnnnnnnnnnnnnnnnnnnnnnnnnnnnnnnnnnnnnnnnnnnnnnnnnnnnnnnnnnnnnnnnnnnnnnnnnnnnnnnnnnnnnnnnnnnnnnnnnnnnnnnnnnnnnnnnnnnnnnnnnnnnnnnnnnnnnnnnnnnnnnnnnnnnnnnnnnnnnnnnnnnnnnnnnnnnnnnnnnnnnnnnnnnnnnnnnnnnnnnnnnnnnnnnnnnnnnnnnnnnnnnnnnnnnnnnnnnnnnnnnnnnnnnnnnnnnnnnnnnnnnnnnnnnnnnnnnnnnnnnnnnnnnnnnnnnnnnnnnnnnnnnnnnnnnnnnnnnnnnnnnnnnnnnnnnnnnnnnnnnnnnnnnnnnnnnnnnnnnnnnnnnnnnnnnnnnnnnnnnnnnnnnnnnnnnnnnnnnnnnnnnnnnnnnnnnnnnnnnnnnnnnnnnnnnnnnnnnnnnnnnnnnnnnnnnnnnnnnnnnnnnnnnnnnnnnnnnnnnnnnnnnnnnnnnnnnnnnnnnnnnnnnnnnnnnnnnnnnnnnnnnnnnnnnnnnnnnnnnnnnnnnnnnnnnnnnnnnnnnnnnnnnnnnnnnnnnnnnnnnnnnnnnnnnnnnnnnnnnnnnnnnnnnnnnnnnnnnnnnnnnnnnnnnnnnnnnnnnnnnnnnnnnnnnnnnnnnnnnnnnnnnnnnnnnnnnnnnnnnnnnnnnnnnnnnnnnnnnnnnnnnnnnnnnnnnnnnnnnnnnnnnnnnnnnnnnnnnnnnnnnnnnnnnnnnnnnnnnnnnnnnnnnnnnnnnnnnnnnnnnnnnnnnnnnnnnnnnnnnnnnnnnnnnnnnnnnnnnnnnnnnnnnnnnnnnnnnnnnnnnnnnnnnnnnnnnnnnnnnnnnnnnnnnnnnnnnnnnnnnnnnnnnnnnnnnnnnnnnnnnnnnttctttttcttttctttaaagatttatttattttatgtatatatgagtacagatgattgtgagccttcgtgtggttgttgggaacctcactcaggttggccccgctcactctgagacagggcttctctgggtagttctggaacttcctatgtagaccaggttggcctggaactcacaaagatctgcctgcctgcctctgcctcctgcctgctgggcttaaaggcatgtgccagcatgccctggctcagcaaaaaaaaaaaaaaaaaaaaattctttttaaatatttatatattttatttatatgactacactgtagctgtattcagacacaccagaagagggcatgggatcccattacagatggttgtgagccaccatgtgattgctgggaattgaactcagaacctctggaagagcagtcagtgctcttaaccattgagccatcagcaaaactttttttttttttttttttttggttttctgagatgggtttctctgtgtagtcctggctgttctggaactcactctgtagatcaggctggcctcgaactcagaaattcacctgcctctgcctcccaaatgctggaattaaaggcgtgagccaccactgccccgcaaaacttttcagataagaaattcaaatgtccttcctactgcctgctgatccagatgtagaactctgagctccttctccagcaccatgtctgcctgcacgctgccatgcttcctgccatgctggtaatgaactgaacctctgaattatcatgtaacttcaaggtatctagctcactcaagccagactcaacaaagatgtgccctgaccccaggcacgtctacatgataagactctgaagtactccaatcagaacacaggatgaacataggagagtgacaaagagtaaaatggtacacagaatgtaaaccaaaacagaggagatgctcggaaatccatggccattatacggagaagccagaagaatctttcatgggtatcacctagacccaaaacagtagtcagtcagacctgctcagaaccagaaacacagcactcaaaatcaatatagaactaagagctcctcagccttcctgaggttctttgaaggtcattggccttatacctaccatcagcccaagaagatgagcccctccaagccccatcctacagatgatgtaactgaggttcactgaagagatcgatcggtagggcaaccaggagtcaaacctcacaccttctcagtcatctgatgaaatggctcaccgtggtcacattcaggggattttc

SEQ ID NO: 2151 - DNA, 1517 bp, Mus musculus
tcgcccgaacgtctagcagagtacctgctgctgtaagcttgtcgtctgggctgcaccgcccgtcttaacccattctcgacttaactactctcgtcgaacaagcatggaagtacagaaagaagcgcagcgcatcatgactctgtcggtatggaagatgtaccactctcgcatgcagcgaggtggcttgcgactccaccggagtctgcagctatccctcgttatgcgcagcgctcgagagctctacctctcagccacggtagaagcccaccagcccgagttcccgccatcccgcagggctcttgaccctcgcctgcacccgccgcgggaagccgaagttgcagtggaagtagcgtcccccgaagccgtgcagcctccggagcccatggatacgcaagaggaagtgctgcgagtccaggagacccctgcgctctgtgacccgccccccgctagagtcagccgcaagcgccggagcagcagcgatttgagcgacagtagtgatgccggactggtaccaagcaagaaggcccgtctagaagaggtggagggggaggcgacgtcggaggttcccgatcgcctgcagcttcctccggcacaaagcgaaggtgccttccctaacctcgcccgcgtcctccaaaggcgcttctccagtctcctgaactgtggacccgccgtgcccccgccgacgccccccacgtgcgaggccaagccagcctgccgcccggccgacaatatgctcaacgtgctggtgcgagctgtggtggccttctgagagctctggtggcttctttcgagcggcgccaccggagcggagaacgcacacccgaggcgaaggccggcgggggccgtgaagaagagccgcggcccgagctgccgagaggccaggggaaggactgaggagcgaggggcgcgggcgccttctcccagacgtgcgtccataggtgctattaaaggactgtcccttccttggcttggagaagggacacctagatcttgaatctcagggtcgaactctctaggggccaggctgccctttcaaggccgtttcactaccattcgcgtttcggcccctacaagtgggcacgcttgtgcaagcggtcagagttgcgtcatgggacagacgcgggtgcttcctgttgccttgcgtgggtgtggggcctgggaggaggccagggtgtggacccgccctagggactgggaagtgacttgagtcacctcgcccccacaggctgctgtgggtgagcctgaactgaaccaatcaaatctgcgatcagagttgaagtggctggagaccccgggactggtcaacctagatgatcgcctggcgtggaccaccgcgggacgggtgggccgctggtcgtagttgctgccgtagacacagcttcttcgggcaggaaagaaaattttttttttaccagcgtgtttaagaaagtctgtttacttttcccacggtgggttgtttaattagcaactacctggagttttacaatgtcagctaggaaaataaagaccatcggtgt

SEQ ID NO: 2152 - protein, 219 aa, Mus musculus
MEVQKEAQRIMTLSVWKMYHSRMQRGGLRLHRSLQLSLVMRSARELYLSATVEAHQPEFPPSRRALDPRLHPPREAEVAVEVDEAVQPPEPMDTQEEVLRVQETPALCDPPPARVSRKRRSSSDLSDSSDAGLVPSKKARLEEVEGEATSEVPDRLQLPPAQSEGAFPNLARVLQRRFSSLLNCGPAVPPPTPPTCEAKPACRPADNMLNVLVRAVVAF

SEQ ID NO: 2153 - DNA, 24481 bp, Homo sapiens
gggggggccagctcctgggcctggggtcttctcacccccacccccttgtcctgggtaggcccctgcctgcccctctctgccttttcctcgggtgtccctcctcgagcccctgtggcattggcttgggtggcagagcccacttgtttcagggaccccaggaggtgccccctggctcccaggactgtgtgtgggtccggggggtgggggggtggggagaagggtcgggcagggggtgcaggggaggaaactcctcaccaggagagccaaagacagggttgtgccttaccccaggagccacccctgtaccccccttgccctgccattcaccctccacccctacccctgggcggcctgctgctttttccttctcttcctcccctgccctgagctgcatggttcccccaccctgggcagccaggaaggaatctgaatggagaatcaccaaccaccagagaaaaaagactgtggggccctcccctgccaactccccttccctggccgcccactcaacccacacctctttcacgcaggacaggctgcccaccctgtccacgtgaagtgccaacgccctccccaccctgggccgagcccccacccctccctgggcccccaagtgagattgcacatttaactactgtaaggagaggagcggcgttggcaaatgtgaaccatgagaatatcagtgatactgatgagaataaactaaacgcctttgtaacagccttgccgcatgctcgttactggggggcccagggaggaacacacacctgcattgtgcccagcagacccaggttgctgactgcaaactgacagcctccgattctaacacgcatgcaagttaccccaacagatacagataacgcaacatatgagctggtcctacacacacacacacacacacaatttttttttctttttttttttttgagatggaatttcactctgtcgcccaggctagagtggcgcgatctcggctcactgcaacctctgcttcctgggttcaagccattctgccttagcccccccaaatagtggggattgcaggcacccaccaccatgcccggctaatttttgtatttttagtagagacagggtttcaccatgttggtcaggctgggctcgaactcctgacctcaggtgatccacccgccttggcctccccaagtgctgggattacaggtgtgagccaccgcgcccagcattttcttttcttttttttttttgagtcggagtttcgctcttgttgccaggctgtagtgtcatggcgcgatctcggctcactgcaaccaccgcctcccaggttcaaatgattgtcctgcctcagcctcctgtgtagctgggattacaggcatgcaccaccaggttcagctaattttatatttttagtagagatggggtttctccatgttggtcaggctggtctcccaaagtgctgggattacaggcatgagccaccaccacacccagcctgaaaaaatacttttaattagctgggtgtggtggcatgcacctgtactcccagctactctggaggctgaggcaggagaatcacttcaactgggaaggtcaaggctgcagtgagctatgatggcaccactgcactccagcatgggcaagagtcagatcccatctcaataaaaaaaaaaaagggagctgtggctctgtcaattttacagcaacactggctcactcggtgcccgcctgtgccgtggctgatatgccaagccccagaaacacatcccatacacacacactccacgccgcattcagaagagcattcatgcattaaaagaacataaaagagatcggcagggcgcagtggctcatgcctgtaatcccagcacttcgggaggctgaggcagatggatcacctgaggtcaggagttcgagaccagcctggtcaacatggcaaaaccccgtctttactaaaaatagaaaagttagctgggcgtggtggagtgcgcctgtaatctcagctacccaggaggctgaggcaggagaattgcttgaacctggaaggcggaggttgcagtgagccaagatcgcaccattgcactccagcctaggtgacgagcaaaacttagtctcaaaaaaaaaaaaaaaaaacgagatcacaaaatttaaccgatattggaaatatctgggtgaacaagagggtcccaagaatatgaaaggacaaatggttctatcaagtaggaaaaaccatggatgcaccgtgggtccccatagactcaaagataacacaagattaaagtaactgggctgggcacggtggctcatgcctgtaatcccagcattttgggaggccgaggcaggtggatcacctgagatcaggagttcaagaccagcctggccaacatggcaaaaccacgtctctattaaaaatacaaaaattatctgggtgtggtggcgggtgcctgtaatcccagctactcaggaggctgagacaggaaaatcacttgaatgcgggaggtggaggttgcagtgagacgagattgcgtcactgcactccagcctgggtgatagagcaagactctatctcaaaataaataaataataacatagaagccagtcatgatggctcacacctgtaattccattactttggaaggctgagagaggaggatcagtggagcccaggagtttgagaccagcctgggcaatatagggagaccctgtctctacaaaaatgaaatagccaggcgaggtggcatgtgcctgtggtcccagctacttgggagactgaggtggaaggctgccttgagcccaggagttccaggctgcagtgagccatcattatgccactgcactccaacctgggagacagagtgagagagaccctgtctcaaacaaacaaacccaaaataggccaggcacagtgactcatgcctgtaatcccagcactttgggaggctgaaataggcggatcatttgaggtcaggagttcaaattcaagaccagcccggccaacatggcaaaaccacatctctactacaaataaaaaattagttgggtgtggtggagcattcctgtaatcacagctattcaggaggctgaggcatgagaaccgcttcaacccaggaagcagaggttgcagtgagccgagatcacgccattgcactccagcctgggcgacagagcgagactctgtctcaaaaaaatataaataaaaataaaaagatcaagagaacctaaaccattaaaaaaaagactcgcatgggtgcggtggctcccgcctgtaatcccagcactttgggaggctgaggcaggcaaatcacttgaggtcaggagtttgagaccaacctggccaacatgaggaatcccatctgtactaaaaatacaaaaattagctgggtgtggtgacacacacctgtaatcccagctacttgggaggctgaggcagaattgctggaaaccaggaggtggaggttgcagtgagcagagattgcaccactgtactccagcctgggtgacaagagtgaaactctgtctcaaaaaaaaaaaaagaaatccggaacacgcacatgtgcacacacacactggagcacttgtgcaagcagtggcttagaatgggagtcccaatcagggctcggtcacgcatttgcagtcaacacacaccacacgacacaaatacatataaaaaaggctgacattttatttccaggttggcacgtgtataaggcacaggggcaaatggctttggggtcctggaactggaaatggagacaggtgtgtctcaggtgtccctgcctccaccaccccctaagtgcacttgagacaggaccagtggtggtggttccagcccagggtcctgaagggtcccactggctctaggggagagccatggggacagctccccaggcgggaccctctactctccagctacccaggagggaccctctcctcctagggggcgaggccagctccaaagtgcttggtggctccccaggcttaagggaccagcctgccagggagggctggggtcagagagagaatagtaagatgagaacgaggagaagcacccccactagcacggcgatggcacaccactgtcggcggtctgggaacgagaaggtcaggggtcacggggagagggtaccacctacaacctgcccccaccaggactgacccctcccctgaggggactcaccactcgtcatgtgggatactttggccaacttcctgaggaccccgtccatgcgggactgggtgtggtccatctcttgggcgaaggcatccagcatgctgccaagaacaggatggcatcagccccagatggcccagacacaccagggcggccgagagcccctggcccacccccagggtcctggcctcacatgccctgctcgtccagctcttctccaacgcggccggacatgtgcttcagaacctggatgctcccagacaccatctccagctgttgatcctgttcatccatgatcagctgcagagcgaaggggtgggagatgctgttgaaaacgaccccagaaggccaggcgctatggcttatgactgtaatcccagcactctgggaggccgagacaggcggatcacttgaggccaggagttcgagaccagcctggccaacatggtgaaaccccatctctactaaaaatataaaaattggccaggcattgtggtgggcgcctgtaatcccagctactagggaggctgaggcaggagaatcactggaacctgggaggcggaggttgcagtgagctgagatcgcgccactgcactccagcctgggcgacaaagcgaaactccatatcaacaacaacaacaacaaaaagggaccccagacctcagatcagtctgcaaggctctcccctcccaagatccaccccgctggccccaaaacctgctgtgtggcctgctgctcctcgatgtagcgagatgtggccgagactgcgctggcatccagcaggtcgctgggtgacttctgggcagctggcttgcctgcgagtatctgcaggggcacacaacataggctcagggagagaccccaactcacagcggggcctgtggggcaaatccccacggtggtaagtcaggggggcagactctggggcaggacagcctgcattccccactcaccacttactagcaaggtgacccagagaccccatcatttggcttccttgtgcctcagtttcctcatctgtaaaatgcagagagcaggatggggcatggtagctcatgcttgtaatcccagcactctgggaggtggaggtgggcagataacttgaggtcaggagctcgagaccagcctggccaacatggtgaaaccccatctctactaaaaatacaaaaattgggccgggcacagtggctcacacctgtaatcccagcactttgggaggccgaggtagatggatcacgaggtcaagagtttgagagcagcctggccaacatggtgaaatcccgtctctactaaaaatacaaaaattagccaggcttggtggcgggtgcctgtaatcccagctactagggaggctgaggcaggtcagaatcacttgaacctgggaggctgaggttgcagtgagccgagatcacaccactgcactccagcctgggtgacaggttaagaccttctctcaaaaaaaaaaaaaaaaaaaaaaattaccgggtgtggcagtgcatgcctgtaatcccagctacttgtgaggctaaggcagcagaatcgcttgaacctggggggcggtggttgcagtgagctgagatcgcaccactgcatttccagcctgggtgtcagagtgaccttgcctcaaaaaaaaaaaaaataaaataaaatgggaagagctagaatccgtgtttcctgggttgaaatgaggatttaaagaattaattgatgggggacacttacagcagtgcccaacacatagtaatgctagtaaatgtcacattttactatttgtttatttttggggggattttagctgggattacaggcacctgccaccacatccagctaatttttgtatttttactagtgatagggtttccccatgttggccaggctggtctcgaactcctgacctcaagtgatccacctgcctcagcctcccaaagtgctgggattacaggcgtgagctaccatgcctggcccaacagatgtttgtttgtttgtctgagacagagtcttgctctgtcacctaggctggagtgcagtggtgtgatctcgcctcactgcaacctccacctcccgggttcaagcaattctcctgcctcagcttcccaagtatctgagattacaggtgatcaccaccacgcctggctaatttttgtattttttgtagagacagggtttcatcatgttggccaggctggtctcgaactcctgacctcaggtgatccacttgcctgggcctcccaaagtgctgagattttaggtgtgagccaccgtgcccggctccaacagatgtattttagagtttggacttgaattcccccaaggcagcacatctggaaggcacgtgggcactgctatgggatgacaaactgggaggagcctcagtcccccaccctccccgaccccacgtacgcttatgagggagagagaaaggctggtggttctcaacatatgaaaaatatcaacagagaacaccaagagaaaaagtggactgacagaggtggttgggagaaacacagaaacacacacacacacacacacacacacacacacacggcaggcacattacagaggaaactagcagatattaggatatgaggggggaaaatgcagatacactcagaggccaagtgcacgcacccaaataggttaggtgcatgcacagatgaaaaggcgggggcggatcacctgaggtagggagtttgagaccagcctggccaacatggggaaaccctgtctctactaaaaacacaaaaattagctgggcatggtggcacactcctgttgtcccagctacccaggaggctgaggcaggagaattgcttgaacccggaaggtggaggtttcagtgagtcaagattgcaccactgcaccccagcctgggcaacatgccaagactccatctcaaaaaaaaaaaaggaagctggccgggcgcggtggctcacgcctgtaatctcagcattttgggaggctgaagctagtggatcacaaggtcaggagatcaagaccatcctggccaacatgatgaaactccgtctctactaaaaatacaaaaattggccgggcgtggtggctcacacctgtaatcccagcactttgggaggccgaggcaggtggatcacgaggtcaagagttcaagaccagcctggccaagatgttgaagccccgtctctactagaaatacaaaatttagccacgcatggtggtgggtgcctgtaatcccagctactcgggaggctgagacagaattgcttgaacccgggaggcggaggctgcagtgagccgagatcacgtcactgcactccagcctgggcgacagagcaacactccgtctcaaaaaaaaaaaaaaaaaaaaaaattagccgggtgtggtggcatgtgcctgtattacagctactcaggaggctgaggctggagaatcgttgagcccaggaggcggaggttgcagtgagccgagactgcgccactgcactccagcctggcaacagagtgagactgcatctcaaaaaaaaaaaaaaaaaaaaaaggaagttatgtgcgatggctcacgcctgtaatcccagcactttggaaggctgaggcaggcagatcagttgatgtgaggggtttgagaccagactgaccaacatgacaaaaccctactaaaaatacaaaaattaggccaggcgcagtggctcatgcctgtaattccagcactttgggaggctgaggcaggtggatcacctgaggttgggagttcaagatcagcctgaccaacatggagaaaccccgtctctactaaaaatacaaaattagccaggcatggtggcgtatgcctataatcccagctactcgggaggctgaggcaggagaattgtttgaacccaggaggcggagattgcggtgagccgagattgcaccattgcactccagcctgggcaacaagagtgaaactccatctcaaaaaaaaaaaaaaaaaaatacagaagttaccctggcatggtgacgagcacctgtaatcccagctacttgggaggctgaggcaggagaatcgcttgaacccaggaggcagaggttgcagtgagctgagatcaagccactgcactccagcctgggcaacagaacaagactctgtctcaaagaaaaaaaaaagagtaaaaggcaggcatgcgtcctggaaacaggtgcacacaggacaaatggcatggaagcagaaaggagataggtacacaggcccccagccctctcctgcaacaggaaaccagtatagacccagaggacacagtagagaggaacccacggacatatacacatagagaggttcaggtgcacacaccgagaaagtgcaggcaggtagacagcaagaagataactgcccacagagaggacgggcactgtcgcaaaagggacaggtgaacacgcacagagggatctggcttggttacccccaggggctcaggtgggcagggtgggtcaggaaggcttacctctctgttattcctctccaaaaatgctacggctgttgggctgaccatatggtccttcatttcctggaggtaaggacagcattagggaggaaagacactcaggctgggcgcggtggctcacgcctgtaatcctagcactttgagagaccaagccgggtggatcacctgaggtcaggagttcgagaccagcctgatcaacatggtgaaaccccgtctctactaaaaacacaaaacttagccgggtatcgtggcaggcacctgtagtcccagctactcaggagactgagacacaagaatcgcttgagcctgggaggcggaggttgcagtgagccgagattgcaacactgtactccagcctgggcgacagagcgaggctctgtctcaaaaaaaaaaaaaaaaagaaagaaagaaagaaagaaaaaaaaacacactcaaaccttcccccactccccgcctgcaggacctttcctgacctggactgcctctcgcatccgctccacgaacacctttctctcctgcaggtccccggctgggagcttgaacttgcctgggttggcttccactatacgtgggctgagagtcaagggtcaaggccggagccagatatcatccccgtccctaggggtccagccctacccgaaggtgggctgccaccgcaatgggctctcccatgccaccctctgccacaaagccccaggatatcgatggtctcttccaggtcctcgaggtcccactcgatgctgcgcaggccattccgcagctcattggtcgtccagtccagctcctcgcgtccgaccgccgcgctttcctgcaggagctcgcaccagcgctggtacagcccgcgggccgtgttcaccgccttctgcacctcgctgcgggcaggggcacggcgggcgcggctgggggcaggcggtcctcccgcctgcctctgcccccgactgcaaacccaaacgcatgggggactccggagacccctatatacccctgcgtgcgcctcccactctgcaccccgacggccttgcccagcccgccgggcacgctggggccggcacccgggcactggctggcttgggtacagagcaccctccgccctcccccgtcgttgtcactcaccctcggactacaaaaaaggggtcttcgagagacatgtcagtcccttcccccccaggccgaacccccctcccggcctgggttcgcgggctggttccctcccaaccgaggagaacgcgccgccacccccgcccccgtcacgccaccatcgagagccggaccgccaggggagaaagagaagcctcggaggcccgacgtgcggacacttccgccctctcctcagccatcttggttgtgggcagaggcagcttccggtgcacatgcccccgccccttagccctctcgtgccgcaccgtagggggcggtgtcggagttctgtctgggcctattcgggtccgagttcggaatttcggttcaaggcccagttcctcggattgttcctgcgcaacttcagtttcccttccaggcacgggcaatgtaaataatgatagcctccctcatctctggcggctgggtattatggctggggaaggggctcattcgattcgttgaagcttttcatggactccctgagctggcacctgggagatcgtcccatcccagggtcccgagtgtcaggtttggctagggtctgggggagaggtggtcctcccttctccctgcgggggcgcggtgaggagcgggcctgctcctccggggagttctgccgcattctcccaatctctttcctgagaagtggcggagttgggggcacttcgaggtcgccttggggcgaggtggtcgtgagggggtcccagatatgccagcagcggggggaggtcacctttgagaaagtgcgtggaggtgggtttcttcagaagcgcggagtctttctgggtgcgagcctgggggtagcgggtggtggctttgaggatggtctccaggggggccctctgtgtgtggggtctccgtctgggtaggggccaggaatatcagcggagggactcagggtcgtccctatgtgtgacagtggcgctgtgtgttggggagcttcgggaaagcactttttttgagtgatagggggcctggtctcccctggagggtgggcgggttatctgagggagtcctcggagggtcgcccccttgcgcgtcagagttgctgcgtggggtctcagagatagcgcctgggctggggaaatcattgtggggtctccgtggtaaggttagcggggtggggacggcctgcgtcttcggcaggtcgtcgcagtctggcaccatcgttgaatggggacgagtttgggaagggtattttaggggggaataacttttgagttcccagcgtgcgggggaagggcgggacgggagggtgtcccaaggcctgagaagatcagtgtggggcaggggtcaggaataacctgggagggggccttgtatgggggaaataattgggaaggggagagatgggatgaagggggcctcagcgggtcgtctcctgtgtatgcagggtcgttctgcagcgtctctgggagatggcgtccctgggagccctcaggtcgcccctacccgctgcggggtgctttcctggcgtcacgccttcctggcccctggagggaaggaagtgaaactctcctcttcccccacccggctggaatgcgagtcaggaagcctggggctccagcctgctccggctgcccgggtcggggatggggaggggcgtggccggagcgcaaagccccgcccctccgcgccccccccccggaagccccgccgccggccgctaaggcgatcacgggccctgtcctaatatgggcaaccggaagcggcccgcgcgactgccctacgtcactccgtccaaatttagttgtggaagtcagcgggcgctggtggcgggaaggcgccgcgagccagtgcgggcggaaagggggcggggggcgcaccaccccttaaagggcccgcaccaggaatgaatggagccattcgaacaattctgcatcctatttttggaggaagtggaattagtatttcttggagagacggcgcgtagcggagggtagggcggagattttctatctgctctgtctctgcattgctgggtttccagctcccaacctaaccccgcctccccgaacgcggagacggaactcggcccccttgtttggggggcggcagccacgtgttcacggggactgtcgtgcgcgccgggttcgcagccgtgcgagctctgaacccacccgtggagctcctgtcgcgggaaactgcgggggaatggcttggtacgaatcacgggaacccgtagcccggggcgggtcaccgcctacaagcaagggctggcgtacgctagagaccgaagagctggaggccccagtggccccctttcacagcagtagcaaatattgtttgtttagtaaatattggcctagtgactctgccttggtttccccacttgaaggaagcagatagaacagtatcctccgaggagtggaggctggggatcggtgaattattgataaaaggagagctcttaacctagcctggcacgttgtaagcgctgttagcatgattattggtgcagaaaacactcattagacacacctggtaaatgctaagaacagtggccacaggggatgttcaggctggaacccgggtcttcccctgtgtgaagggaaacttgctgcccacgacccactggggcctccagacgggagcatgtgggtaggccgtgagctccacccccggcccccctcccttgggccaaggcgctgatgcatcggcggggctcagagaaaggagcccacccagaaagctcagcgtggagtcgggggacgctcctcctcgccagggttcccgtcccctttccctgctgggtaaatcgcattctgtctctttaaggagtgtttggccgcgacgagttggaaagcccggatgcgtccttcggttgggcggggtgtctcagtgacgtcactgggggtataaaagggcctgggtggcgggcgcctgggcagagcgtcctagcagtgtcactgcgtgggttggtttgtgtagagaggcgtgagcgagcccgttgtccggagtgcacctgctgcctgttctgtccctcccgggagcccccgccgctgtcgccgtcgagtcgccatggaagtgcagaaagaggcacagcgcatcatgaccctgtcggtgtggaagatgtatcactcccgcatgcagcgcggtggcctgcggctgcaccggagtctgcagctgtcgctggtcatgcgcagcgcccgggagctctacctctcggccaaggtggaggccctcgagcccgaggtgtcgttgccggccgccctcccctctgaccctcgcctgcacccgccccgagaagccgagtccacggccgagacagcgacccccgacggtgagcacccgtttccggagccaatggacacgcaggaggcgccgacagccgaggagacctccgcctgctgtgccccgcgccccgccaaagtcagccgcaaacgacgcagcagcagcctgagcgacggcggggacgctggactggtcccgagcaagaaagcccgtctggaagaaaaggaagaagaggagggagcgtcatccgaagtcgccgatcgcctgcagccccctccggcgcaagcggagggcgcctttcccaacctggcccgcgtcctgcagaggcgcttctccggcctcctgaactgcagccccgcggcccctccgacggcgccgcccgcgtgcgaggcaaagcccgcttgccgcccggcggacagcatgctcaacgtgctcgtgcgggccgtggtggccttctgaggaccccgagcggcgctgccggagcccagagcgcgcgtcgaaccgtcggcccgagggcgcagacctgaggcgaggccacccccctccatcctgggggaagcgcccgcgaaaaccgtggagagaagccgccgcccgggctgctgagaggcccggagagggactctgtccccggggagccatcgccttcagtgtgcagggacggcaccgaggagtctgagccgggggcgcgggcgccttccgcagagacctgcgcccacaggtgctgtcttagtggactgggacgtgaacctttcgctctccttctggactgggagaagggaggcttgggtgttgtgttttttgttttgtttgtttgtttgtttttaaagatctcctcagggtcggacttcattttgtactgtgggctgtgctggccctttcaaggtttttcaagagttggttttgcgtttccaacctcggagaattccaggcactccccttccccctccgctgacatacttgtataagcggtcatcgttgcgtcatggggcaggcgtggggagcttcctgtcgccttgcgtgggtgtggggcctgggaggaggtcctggggcgtgcactcgccctgggcagtggggaggagagtggcctgagttacttcacccccgcgtgctgctggttaatgtcccgcgtctctgcaccttcgggtgggagcggggactgatctactttcacattctcaagtttttctcatctgcattagaggtgcccagtaggttcccaggttccagcgtgcccctccctcagacacacggacacaatcagccgagaagttcctggtctgaatcacgagaatgtggaggggtggggggtgtcagtggaaaggcataaggctgagctgagaccagttgctggtgaaactgggccaatctggggaggggaacatccttgccagggagtttctgagggtctgctttgtttacctttcgtgcggtggattctttttaactccgtctacctggcgttttgttagaaatgtcagataggaaaataaaaaccatttgagtaaaaaagccggtgctgtctggttttctgctgtggtgggggaggggcggggttaaagcgtcaggggctggcagccgctcgctggggccccaagaaccggtctgaccggttaccacgtgggcgagagagggttgggcccccttttccttgcccgggcattccctaactggtggagccccgcctcccccagatttgggggttcccttgaaattgtcctacaactccgggacagggagatcggggctttctgagttgagacaatagtgctaaacacactgccccaagcggagctggggatcgattgcacgcactttgaagccttgaaaggtggtagatctcgcccccaccccctagaccaaactgaatcagctgtggccggggccctacagtatcaggtggagctgagcgggtgagctttgaagggctctttagtccccagttcccgtatcttcctcgaggaatcgttgtgtgtctcaggcagggacgtgcagcctcagtttcctcatctgtgaaatgggcctctaagcagcttctccacccggcattaggtttttaaaaatgcccattagagccctagttattttcttgggtcactccccagctctagaataaccaccccgaaacgagaaagccctttcaatataccccacgtaggtttaagagtggggttgtgggcgttgccccagggcgaagggagggggcctgtcgggaagacaaaggagtcgcaggtgcggggagtggtggcggcggcaggcgccgggaaagcgctcgccccgccccgccgacggctggctctgccgccgcaggcttcccatgaccccaggggaactgaccccgtggccacagggtagaaggaggggcaagccggcctcagaacgtctgctggtggaatctgggagctttggctcccctcccgcccaacccacaccccctttcctctcctgtgtggattgtgaaggagagcttctcaccgttctccagccaagctcgcccccacggctgcctgattccttcctgggaacacgtggggggacttttaaaaggcgccacctactccgagtcctgacccacccaactctcccaggggacgtgggggcactggagccccacaccgcaggcggtagctcaatgcacccgcgtcggagttcctcccccgcgagcgtggcaaggctcagggaagtcccgggcccctggggagggggccttgccgcgcatcctgtcgcaggaaccgccgggcccttccttccgcgggaagcggcttggccgacccccgcccccgcccgggcctcttgggggtttccggtgcccggccaccgtggggctggggactgaaagtgatgggactgaagatggggctggaacaaacacactacagacacatccccttaagacacacccatccccaagaccccactggacccatcagaaaaggcagcattgaaccttgtcacagcaaataacattggtgaggcctggactaattgattggacaatggctgtgaaaactaaaaaggtcacccatcctgtgaccagcaggttccagcagggaaccccaagcctgctgcaggagactccagaaaggtgtttgctgctggcttgtactaaattggcacaaactgcaaacagcacagcctacatgcccatcctcccagatgggtcctccccagaggataaaaggccggagccagacagaactacacacacaggccacacagataattcggtaccagaaacatgatgctgagtgacaaaggccagctgcagaagtcaggtaagaagcacatattctgggccgggcatggtggctcatgcctgtaatcccagcactttggaaggctgaggtgggcagctcacctgaggtcaggagttcgagaccagcctgatcaacatggtgaaaccccatctctactaaaaatacaaaaattagctaggcaaggtggcaggcgcctgtaatcccagctatccgaaggctgaggcaggagaatcacttgaactcaggaggcagaggttgcagtgagccgagatggtgtcactgcactccagcctgggctacagaggaagactctgtctcaaaaaaagaagaagaagaagaagaagaagaacatattctggagggagggaaacaaccaggtctactttcgttttcttgctatgcatccttgagtgagtcacttgacctctctgggcctgtttccccaaccgtatactggggacaataatagtccctgccttttaggtttgttgtaaggattgagattacacatgtaatccttacaacaaacctagcagagtgctggcacgtagaaaatgctaaatgtgctgggtgccatggttcatgcctgtaaccccaaaaatttaggaggctgaggtgggaggatcacttgaggccaagagttttcagtgcaatcatggctcagtgtagccatgtagcctcgaactcccagactcaagcaatcctcctacctcagcctcccaagcaggttggaccacaggctcaggcaccatgcacagctaatttcttttttttttctttctttctctttttctttcttttctttcttccttccttctttcctttttctttctttcttttctttccctccctccttcccttcctttcttcctttctttcctttctttctttcaactagagtctctctatcacccaggctggagtgcagtggcttgattacagttcactgcagcctcgagctcctgggctcaggcaatcctcccacctcagcctctggagtagctgggactacgccaccacacccagctaatttttcttttttttcttcttctctctcttttcttccttgtctctttcttttcttttcttttttgtttttgacagagtctcgctctgttgccaggctggaatacagtggtgcaatctcggctcactgcaaccctggcctcccggattcaagcagttcccctgcctcagcctccgaagtagctgggactacaggcgcacaccacgacacctggctaattttttttttcccaccggttgtcaaatgaccctttattgaaatatttttctttgtgcttcttaactagctgggcatttcacagcaccactgtgggtttttctggttttttggggtttttttttttgagtcggagtcttgctctgtcgctcaggctggagttcagtggcgcgatctcggctcactgcaagttccacctcccaggttcacgccattctcctgcctcagcctcctgagtagctgggactacaggcgcctgccaccacgcccggctaatttttttgtattgtatttttagtagagacggggtttcaccttgttagcaaggatggtcttgatctcctgacctcgtgatctgcctgcctcggcctcccaaagggctgggattacaggcgtgagccaccgcgcccagccatcaccactgttgatgtcatctatgatgtcacgagggtggcggccatcaacattacggcctacagactgggcagtccccaggatctctttgatggttccagagagttctctggctaaagatcggtgccacatctgtcgagtaatgttgacgatctcatcaaaagtgatattcccattgtgtctaatgtttttctgtttctttctgtctcttggtggttccttgagggctttaatgatcagggcagaggcagaaggcaccacctcaatctgggcctgtctgttctgaatggtcagtttcactgtaatcctcaggcccttccagtcaccccattgccttggcaaggtcattaccaagcttttttggagacagacccagggggccgatcttgggggctagtgcagaagtggcacccccttcaccccgagtgcacctcaggtatacaaatttgatctcgttggggttgaactttggcagcatggtggaggtgattggttttggaaaaacctggattctggacaaccgaagaaagctgcaccttgggctcctccaagccgaaagcccagctaattttttttttctttttgacacgaagtcttgctctgtcaaccaggctgcagtgcagtggtgcaatcttggctcactgcaacctccacctcctgggttcaagcaattctcctgcctcagcttcctgagtagctaggattacaggcacccgccaccatgcctggctaatttttgtatttttagtaaagacgaggtttcaccatgttggccaggctagtttcaaactcctgacctcaggtgatccacccacctcggcctcccaaagtgctgggattacaggaatgagccaccgcacctggccgaaattttttgtattttagtagagacggggttttaccatgttggccaagatggtctccatctcgacctcgtgatccgcccgcctcagcctcccaaagtgttgggattataggcatgagccaccgcgcctggctctttcttttctaacagggtcttgctctattgcctaggctggagtgcagtggcacgatcttggctcactgcaatatcttcctaacaggttcacgagattctcccacctcagcctcctgagtagctgggattgcaggtgcacaccactgcgcctggctaatttttatattttttgcagacacagggtttcaccatgttgcccaggctggtctggaactcctgagctcaagtgatctgcctgcctcagcctcccaaagtgctgggattacaggcgtgagccactgcacctggacgtatttattttttacttaggatttgtgccctaactcagaagttaattctgttaattctaccaatgtccagcctgagcctgaatgagtgaatgaggttgttttgggtaaacaggtgttacatgcttaatgtttatcatctcattaaatcagtggcttctacatgactcttagaatttctcaaacctcagatggttgaggggtcaggatatttgtgatattttcataactactgtactattattattatcatttatagacagggtcttgctatgttgcccaggctggagaacagcagcgccatcatagctcactgcagcctccactgcctaggctcaagcagtcctcccacctcagcctctgcaggagctgggaccgcaggcctgtgacaccatgcccagctaactgtattcatgtaatagttttctttgcgttaacccacttattaatcactctccctatttagaaagtaacagttttttaaaaggttacaatgaaaataaaacaatgtcaaaagatcctgctgaaacagtaacaggtttaatagtttcaaagagagattagccagccttaacgacacattgtttccaagggaagaaaactatgcttgggctgagaagggggatgcaagttgacaagggagaaatttggagagatccagtccacgttatttaaataacattgaattgggctgggcgaagtggctcacgcctgtaatctcagcactttgggaggccgaggtgggcggatcacctgaggtcaggagtttgaggccagcctagccaacatggtgaaacatcacctctaataaaaatccaaaaattagccgggcatggtggtgagtgcctgtagtcccagcgacttgggaggctgaggcaggagaattgcttgagcccgggaggcagaggatgcagtgagtcaagatcacaccacggcactccagcctgggcaacagagtgagactgtctcaaaaaaataaataaataaataaataaccttgaattattttgccacactgtcccagaatatggaaaattctgcttctggaagagggacaaactcctatgatgatctgcaaggccctgcttgatctggggccatcccatctctggatgaatcatgcatcaccctctggccacatggacctgctttttgttcctcatacttccacagccttctcagccacatggcctttggatatgccgtgacctcctgaagatctttcagcttccttgctcacctagtgaagccagctcagctcaaggggcaaatcctcagggaagtgttccctgtctaaccctcttttggcctaaggactgctttattttattttttatttttattttttgagatggagtctctctctgtcacccaggctggagtgcagtggtgcgatctcagctcactgcaacctccacctcccgggttcaagtgattctcctgcctcagcctcccgagtagctgggattacaagctcccaccatcacacctagctaatttttgtatttttagtagaaatggggtttcaccatgttgtccaggatggtctcgatctcctgatccgcccgcctcagcctcccaaagtgctgagattacaagcatgagccaccgtacctggcctattttattttattttaattaattaatctatttttgagacagggtcttgctttgtcgcccagactggagtgtagtggcatgatccaaggctcactgcagcctcaaagtctagtgcttaagggatcctcccatctcagcttccagcatagctgagaccccaggcacacaccacgatgcctggctaattttttattttttttgtagagatggaatttccatgttgcccaggctggtgttttttatttatttatttaaccagtctctgatgggaggcaagacccctatatttgacactcggatcaagagctactttatttaaaacatttggccaggcatggtggctcacgcctgtaatgccaacactttgggagaccgaggcaggaggatcacgaggtcaggagttcaagaccaacttggccaataaggtgaaaccccatctctactaaaaatacaaaaattagccaggcatggtaacacgcgcctgtagtcccagctactccagaggctgaggcaggagaatcgctggaaccttggaggagaaggtttcagtgagccgagatggcaccactgcactccagctgggcgacagagtaagactctgtctcaagaaaaataaagagaccaggcgcagtggctcacacctgtaatcccagcactttgggaagccaaggtgggcggatcacaagttcaggagctcgagaccagcctggccaatatggtgaaacctcatctctactaaaaatacaaaaattagccgggcgtggtggcaggagcctgtatcccacctcttgggaggctgaggcaggagaatcgcttgaacccgggaggcggaggttgcagtgagccaaggtcaagccacttcactttagcctgggcgacagagcaagacttcatctcaaaaaataataataaaataaatttttgcggggctgggagtggtggttcatgcctgtaatcccagcatttttggaggctgaggtgggcggatcacttgaggtcaggagtttgagaccagcctggccaacatagtgaaaccccatctctactaaaaatacaaaaattagccaggcgtggtggcgcgcacctgtagttccagctgctcggaagggtgagatgggagaatcgtttgaacccggggccggggggctgaggttgcagtgagctgagatagcgccaatgcactccagcctgggtgacagtgagactcagtctcaaaaaaaaaaaaatttttttttgttaatacttatcacaagtgcaattttacctttgtagaattaaaccgttgtttctgagttagtttcctcttgtagcctactgcctccaagtctagcagatggttaagcggtttttgtgaatgaatgatgcctttgcaaccttcgtttgagatctgtcctcttaacgtccactgtgtatatatgaggaaacaggcccacagagtttcgctctgcaagacagcaagtaaaggacagctctagtcgggtcctctatcccgaagcctcctccccactctgccctgccctgccgtgcaggacccaaaggaagggcgccccagttcagcctctgtagatctgggaaagggccgggccacaggtcgggaccaatccagaagcagcacccagaccggtttacccggttccaggaccttgggcgaagtccacccgcccgagggcagggacgacgcaggccacgccgcggcccagttgctagccaggcagggtggggatttgatcttgccaaggaaatgtgagcgggaggccgagcgttggaggtgggtaagtcgtcactatgcagggcggagccatcctgtgtctatcacgcccaagggcggtgcatgcaaattgactcccgcatttggcttttccccgggctccgtctccgcgcgctgcaacccgcgacttccaagaactccccgcgtagtcagctgcccgggccacgccccctttccggacccgccctgcccgccccagggaggcgggggcggagcttgcggcccagcgggaaggcggaggcgggggtcgcgcccaggtcccgggggcgtcagaggcaatgggaagtcgtggcttctgcaccgcccttgggggttcggctcccaatcagggaaaaagggccgagagaatgaaagagtaatgagacttgcgagtttgaggctcacactactctctttgggttgggggttgctgaagcctccacgtgtattcagggagccccgaacctcacacctctgtccaggggagctcagaacccgccgtgttctggaaagcctacaccttccccggttttttagtgtctaggggagcccacaaccctcacagccgtgtctagtagcgctcagatccacacacctgtgtttgggggagcccagatcttctctacctgtgtccagatgagttcagagcccccacgtttgtccaggaaagcccacctctgtccagaagcgctctgaccaggacctttcctgtttcctgaggctcagcctagggggtcatcccacccaggtctgtgttaaggggagcttgtgtctccccaaacatgtccaagtgagctgagctcaggagctgaggcctccccatatcgtgctccccgcctggccctttggtgaatccctttctcagaagaaaccctcaggggccctagccctgctgcccttccctgcactgtcttcgagcctcctggcccaattggcccctcccccagtacactgttgagtcttagttaagacataatcccagcattcactgtcccccatcccccagctctcccgcacctcggcggctggccgggcccccgggagtgccgtcatcccagccggctggccacccgactggcaccaattaatttcctcctcggcctgtccacccagggcctcggcctgtctggttgccagctgctcaccctcagccagcccgccccctcgggctcccagggaattgccaacagttctcctccttcctgcaacccccccacccccaatccaggccaccccacccagcacagttaatcagaaaaagctgacagttaggacctggaggagtgatctgaaatcagatggaggaggggtgggatgttaaactttcggacccagggatgcttggggtggagcgggggcatggctggagggaggcagaggatccagttttacttaagaaccccaaatcaaaggcttgtagcttccagatggggactgcagggagggctgaccccctcccgcatacaccaggcgggcaaggtggagcgcccctcctcggaaattgccccccgcccaagatgcgtcagtgacagctgtgcctcctcagcccgcacccagccggtttccttttcctgtgcacactctcccgatgggctggccttcagcctggagagactccacggccccttggaaggggctccccagagggtcttcctggacgagggggaggggacaggctgaagaacaatggggcttctgtggctgcaggacgccaggcacttcctgttaaccctttcctcggggtgcagctgcagggagcacctcccaggtcccgccttgtgggaaggggcagaggcagcctgaggggaaatcttgttgcgggaattaactgttgtgttaattgaggcttttgtgagtgtacttaggaggggtgaggtgaatcacaccttttctcacttgatggagttacagggctttctcctctattgctgagggctgtgcagt

SEQ ID NO: 2154 - DNA, 2079 bp, Homo sapiens
ccgtagggggcggtgtcggagttctgtctgggcctattcgggtccgagttcggaatttcggttcaaggcccagttcctcggattgttcctgcgcaacttcagtttcccttccaggagtgtttggccgcgacgagttggaaagcccggatgcgtccttcggttgggcggggtgtctcagtgacgtcactgggggtataaaagggcctgggtggcgggcgcctgggcagagcgtcctagcagtgtcactgcgtgggttggtttgtgtagagaggcgtgagcgagcccgttgtccggagtgcacctgctgcctgttctgtccctcccgggagcccccgccgctgtcgccgtcgagtcgccatggaagtgcagaaagaggcacagcgcatcatgaccctgtcggtgtggaagatgtatcactcccgcatgcagcgcggtggcctgcggctgcaccggagtctgcagctgtcgctggtcatgcgcagcgcccgggagctctacctctcggccaaggtggaggccctcgagcccgaggtgtcgttgccggccgccctcccctctgaccctcgcctgcacccgccccgagaagccgagtccacggccgagacagcgacccccgacggtgagcacccgtttccggagccaatggacacgcaggaggcgccgacagccgaggagacctccgcctgctgtgccccgcgccccgccaaagtcagccgcaaacgacgcagcagcagcctgagcgacggcggggacgctggactggtcccgagcaagaaagcccgtctggaagaaaaggaagaagaggagggagcgtcatccgaagtcgccgatcgcctgcagccccctccggcgcaagcggagggcgcctttcccaacctggcccgcgtcctgcagaggcgcttctccggcctcctgaactgcagccccgcggcccctccgacggcgccgcccgcgtgcgaggcaaagcccgcttgccgcccggcggacagcatgctcaacgtgctcgtgcgggccgtggtggccttctgaggaccccgagcggcgctgccggagcccagagcgcgcgtcgaaccgtcggcccgagggcgcagacctgaggcgaggccacccccctccatcctgggggaagcgcccgcgaaaaccgtggagagaagccgccgcccgggctgctgagaggcccggagagggactctgtccccggggagccatcgccttcagtgtgcagggacggcaccgaggagtctgagccgggggcgcgggcgccttccgcagagacctgcgcccacaggtgctgtcttagtggactgggacgtgaacctttcgctctccttctggactgggagaagggaggcttgggtgttgtgttttttgttttgtttgtttgtttgtttttaaagatctcctcagggtcggacttcattttgtactgtgggctgtgctggccctttcaaggtttttcaagagttggttttgcgtttccaacctcggagaattccaggcactccccttccccctccgctgacatacttgtataagcggtcatcgttgcgtcatggggcaggcgtggggagcttcctgtcgccttgcgtgggtgtggggcctgggaggaggtcctggggcgtgcactcgccctgggcagtggggaggagagtggcctgagttacttcacccccgcgtgctgctggttaatgtcccgcgtctctgcaccttcgggtgggagcggggactgatctactttcacattctcaagtttttctcatctgcattagaggtgcccagtaggttcccaggttccagcgtgcccctccctcagacacacggacacaatcagccgagaagttcctggtctgaatcacgagaatgtggaggggtggggggtgtcagtggaaaggcataaggctgagctgagaccagttgctggtgaaactgggccaatctggggaggggaacatccttgccagggagtttctgagggtctgctttgtttacctttcgtgcggtggattctttttaactccgtctacctggcgttttgttagaaatgtcagataggaaaataaaaaccatttgagtaaaaaa

SEQ ID NO: 2155 - protein, 223 aa, Homo sapiens
MEVQKEAQRIMTLSVWKMYHSRMQRGGLRLHRSLQLSLVMRSARELYLSAKVEALEPEVSLPAALPSDPRLHPPREAESTAETATPDGEHPFPEPMDTQEAPTAEETSACCAPRPAKVSRKRRSSSLSDGGDAGLVPSKKARLEEKEEEEGASSEVADRLQPPPAQAEGAFPNLARVLQRRFSGLLNCSPAAPPTAPPACEAKPACRPADSMLNVLVRAVVAF

SEQ ID NO: 2156 - DNA, 3046 bp, Homo sapiens
aagccccgccgccggccgctaaggcgatcacgggccctgtcctaatatgggcaaccggaagcggcccgcgcgactgccctacgtcactccgtccaaatttagttgtggaagtcagcgggcgctggtggcgggaaggcgccgcgagccagtgcgggcggaaagggggcggggggcgcaccaccccttaaagggcccgcaccaggaatgaatggagccattcgaacaattctgcatcctatttttggaggaagtggaattagtatttcttggagagacggcgcgtagcggagggtagggcggagattttctatctgctctgtctctgcattgctgggtttccagctcccaacctaaccccgcctccccgaacgcggagacggaactcggcccccttgtttggggggcggcagccacgtgttcacggggactgtcgtgcgcgccgggttcgcagccgtgcgagctctgaacccacccgtggagctcctgtcgcgggaaactgcgggggaatggcttggtacgaatcacgggaacccgtagcccggggcgggtcaccgcctacaagcaagggctggcgtacgctagagaccgaagagctggaggccccagtggccccctttcacagcagtagcaaatattgtttgtttagtaaatattggcctagtgactctgccttggtttccccacttgaaggaagcagatagaacagtatcctccgaggagtggaggctggggatcggtgaattattgataaaaggagagctcttaacctagcctggcacgttgtaagcgctgttagcatgattattggtgcagaaaacactcattagacacacctggtaaatgctaagaacagtggccacaggggatgttcaggctggaacccgggtcttcccctgtgtgaagggaaacttgctgcccacgacccactggggcctccagacgggagcatgtgggtaggccgtgagctccacccccggcccccctcccttgggccaaggcgctgatgcatcggcggggctcagagaaaggagcccacccagaaagctcagcgtggagtcgggggacgctcctcctcgccagggttcccgtcccctttccctgctgggtaaatcgcattctgtctctttaaggagtgtttggccgcgacgagttggaaagcccggatgcgtccttcggttgggcggggtgtctcagtgacgtcactgggggtataaaagggcctgggtggcgggcgcctgggcagagcgtcctagcagtgtcactgcgtgggttggtttgtgtagagaggcgtgagcgagcccgttgtccggagtgcacctgctgcctgttctgtccctcccgggagcccccgccgctgtcgccgtcgagtcgccatggaagtgcagaaagaggcacagcgcatcatgaccctgtcggtgtggaagatgtatcactcccgcatgcagcgcgcgcccgggagctctacctctcggccaaggtggaggccctcgagcccgaggtgtcgttgccggccgccctcccctctgaccctcgcctgcacccgccccgagaagccgagtccacggccgagacagcgacccccgacggtgagcacccgtttccggagccaatggacacgcaggaggcgccgacagccgaggagacctccgcctgctgtgccccgcgccccgccaaagtcagccgcaaacgacgcagcagcagcctgagcgacggcggggacgctggactggtcccgagcaagaaagcccgtctggaagaaaaggaagaagaggagggagcgtcatccgaagtcgccgatcgcctgcagccccctccggcgcaagcggagggcgcctttcccaacctggcccgcgtcctgcagaggcgcttctccggcctcctgaactgcagccccgcggcccctccgacggcgccgcccgcgtgcgaggcaaagcccgcttgccgcccggcggacagcatgctcaacgtgctcgtgcgggccgtggtggccttctgaggaccccgagcggcgctgccggagcccagagcgcgcgtcgaaccgtcggcccgagggcgcagacctgaggcgaggccacccccctccatcctgggggaagcgcccgcgaaaaccgtggagagaagccgccgcccgggctgctgagaggcccggagagggactctgtccccggggagccatcgccttcagtgtgcagggacggcaccgaggagtctgagccgggggcgcgggcgccttccgcagagacctgcgcccacaggtgctgtcttagtggactgggacgtgaacctttcgctctccttctggactgggagaagggaggcttgggtgttgtgttttttgttttgtttgtttgtttgtttttaaagatctcctcagggtcggacttcattttgtactgtgggctgtgctggccctttcaaggtttttcaagagttggttttgcgtttccaacctcggagaattccaggcactccccttccccctccgctgacatacttgtataagcggtcatcgttgcgtcatggggcaggcgtggggagcttcctgtcgccttgcgtgggtgtggggcctgggaggaggtcctggggcgtgcactcgccctgggcagtggggaggagagtggcctgagttacttcacccccgcgtgctgctggttaatgtcccgcgtctctgcaccttcgggtgggagcggggactgatctactttcacattctcaagtttttctcatctgcattagaggtgcccagtaggttcccaggttccagcgtgcccctccctcagacacacggacacaatcagccgagaagttcctggtctgaatcacgagaatgtggaggggtggggggtgtcagtggaaaggcataaggctgagctgagaccagttgctggtgaaactgggccaatctggggaggggaacatccttgccagggagtttctgagggtctgctttgtttacctttcgtgcggtggattctttttaactccgtctacctggcgttttgttagaaatgtcagataggaaaataaaaaccatttgagtaaaaaa

SEQ ID NO: 2157 - protein, 288 aa, Homo sapiens
GVFGRDELESPDASFGWAGCLSDVTGGIKGPGWRAPGQSVLAVSLRGLVCVERRERARCPECTCCLFCPSREPPPLSPSSRHGSAERGTAHHDPVGVEDVSLPHAARARELYLSAKVEALEPEVSLPAALPSDPRLHPPREAESTAETATPDGEHPFPEPMDTQEAPTAEETSACCAPRPAKVSRKRRSSSLSDGGDAGLVPSKKARLEEKEEEEGASSEVADRLQPPPAQAEGAFPNLARVLQRRFSGLLNCSPAAPPTAPPACEAKPACRPADSMLNVLVRAVVAF

SEQ ID NO: 2158 - DNA, 43248 bp, Mus musculus
  misc_feature (1)...(43248): n = A, C, G or T/U
acaatcacaacaaaaatcttaggttcgcttgtaggtctcctgagaaaatgagtccgagaatgaaatgtgtagagactgattagacaccatggctaagagcccatggccctgatggctttctggacggggctgtgcaaggagcatttccccttcaggcctcaccgggacctctgccctgaaacccctactgagcacccagtatcctcacaccccacacactccaaagcagcctgtttcctgttttaagggtgacaaaggaaatttgagaagttttgcattaatcaccccacataagcacctcaccctgtaaccaaaatcactgagaacatggggcatggatgtgaggatttgcaaccctcccgccctggtgcagctcacggggctctgggctgacggcggtgctacctgaatggaatgggaccagtagcctgtggtcctttttgaaatgcccagggtcgacactgcatgctgtgcatacactctcggcgacggcgccagccacgggcatctgtgcaggaagctggcgggcgcagccccgctgctggtcacgtagaaggggatcaggctctgcacaaagatccccttagaggcatactcgtactgcagggctcggctgaagtggtccagataggcctggggggcagaggaggaggacttatgacctggaaggaacttgaaagcaaccccaggagcagagaggcttgcctgtctccacctgtggggaaagtgccaacgtaagcaactgggagctgcctactttccgaccagcccacggggacaagaaccttaccttggacgcagagaaggcagccagctgtggggtgggcttgcagcaggaaccagaagacacggtgacgatggcgcccttctttctctccaccatccctggcagcacgatgtgcaccatcaggctggcggctgcgatgttcacgttcacgatgtcccagagcgtgtcctcgggcacctggctgaaatactgagggtaggggtagaatgcacccacgtcgttcaccaggatgccaatgtctctgtctctcagggcttctcggatgggggcgtaaatctcccggcctctgctgaagtctgccaccaggacaagcgtctctaccctgtaggtgtcggctatgtgcttggccgcggcctgcagcttctcctcttcctggctgatcaggatgacattgagtccgtggctcgctaactcctccgcataggccttcccaatgccatcggtggcccctggaaggcaagccaggagccgtgaacacgttgaaacatggtatccttaaagagatccaacccactccctgttgatctcatcagagaagaatgcacaccggaaaaaggcattaacacctgtcagtcaaggacaatggtgaatcctaaccctgcagacccccaggcagggattagcgagatggctcagcgagtagaggtgcttgctgcccagacaacctgagttcaaatcctaggacccacatggtggaagggaggactcccacaagttgtttccagaccattccatgtgcacagtggcacacagagacctttatgtgtgtgcgagtgcccacactcagagccctggaataagtcgctataggaatctgtttccagacttgcacctggcttgctcaggtgtccgggtttgctttctaggtcacagagataaatcaccatgcaattcaaactgagaacactgactgtctcagaggaaaatttcaaaacacagatcagggcctggcgtggtggcgcacgcctttattcccagcactcgggaggcagaggcaggcagatttctgagttcaaggccagcctggtctacaaagtgagttctaggacagccagggctatacagagaaaccctgtctcgaaaaaaaacaaaacaaaacaaaaaacaaaaacacaaagcaggaaagacatgtagggggcgggaaggaggggctggggaccaagctggagaaatgaggagtgtactggctggtttgatgtcaacttgacacagctggagttatcacagagaaaggagcttcagttggggaagtgcctccatgagatccagctgtaaggcattttctcaattagtgatcaagggggaaaggccccttgtgggtgggaccatctctgggctgggtagtcttgggttctataagagagcaggctgagcaaaccaggggcggcaagccagtcaagaacatccctccatggcctctgcatcagctcctgcttcctgacctgcttgagttccagtcctgacttcctttggtgatgaacagcagtgtggaagtgtaagctgaataaatcctttcctccccaacttgcttcttggtcatgatgtttgtgcaggaatagaaaccctgactaagacaaggaggatgccagtctgagggcagggctccctgaagtgaggtgagagagcacagaacgaggcctccccaggatgcagaagactccagttaagttctgtagctccctgttggaagcattgacttaacgcacaccccagacagaaaggccaccaagctgcagttaccactgatgaccgcccatcttccatactgcttgatcaggtcgggcctgctccccaggcgagggatgaagtgcagcctgaccaggctgtagaagtcacagatgacggtgatgctctttcgggctgtgtaccaggctcccaccaaggccaaggcttccatgtagcaattgcaagacctggcgatttccctgtacaagaggtagaagctgtcaacagcagccatggcgacctgcagggacaggaagagagagagaaagagatgctctttgtggacggagcaaaaccagaaggagcagacatcctcagcaggacggaggaccctggccttcacagctctgcattcacataaccattcccgagagcagccggcctgagactgggaaggcatgaccccactgtgtaacaccggtggcttaggaagttcttgccttccaaggagatgatgccagagaactactgagcaacgggattcctctaagactcttgattctgtgctaccggcggcctaaacaaagataaactcgggtgcctacttcagagctctaggagacacaactatcactgggtagcagcctgggatgtatgtatgtgttcagctcctggcattattcaaccagcaagtacagtggacctacgacctcaaaagtaactaataaacagtcacagcacgtggccttggccccaagaaacatgcatattaaataaaaggggcacccccacccccaccgccaatgaggagctggtaatctttcaggacaacacagcaagcaccctcccttattagtttggtttgtttggtattttccttcctggcctctaggttcgagaaagtcccacgcatgtcttctaagtgtatacacagcaaacaggcactaaagggtggacgtgtcacacatatagtgacaggtgttacacatccaagaaacaggcaggcatttaacaactaaaaagcaaccctgcctgggtaccttagcctacgagcaggggtgaccctggagaggtgggcagaggccaggcatggtcccgacggcatcactaagggctgagctccatcctgggccacagcagatgaggcgctgtagtcagatgagcctaaaggctcacacacacatagtgagccaggtgagatgacacacgggaaactggatttcaaacccctcccagaaagaaaacatgagtgttgtggggatgacttctggaaggaaattccgctaaagcgagaggaggggagtacagaaaataacagaggcaaaatggtaggatttttgggggaggagcgagtcctctgtgtctaaggcaccttctgcttctaacctgacacaactcaagctctgtcaagtttcccaggagggaaaatgtaacaaactaaccaccaagccggaccagtgggaggcacagggaaccgtgagaactgactgccagcccggggcaactaggactatacagccggtggcagacagcagagacacagcagcaagctgtgaggcccagaccacaggggtgcttccccagtaagctccagatttctacagtaaactgtgaaaggtcttctcaacctggagtagtgatgggaacacatcatctcagaatctgggaggctgaccaaggaggaggccaagattgaggccaaaaaagctgggctgtacacatagtaatgccttgtcttcaaaaaataaatatataaattaaaaaaaatatatattaggccccagctgaactcggtgatacacgcctttaatcccagcactgggaggaagaggtaggtggatctcttcgaggtcaatgctaacctggtctacatagtaagttccagaccagtcagggctgcatagtgatgaaccctgtctccccccccccccaaaaaaaaaaaagcaaaagaaaatcaggctccatgacacaggtctgtcatcatcccagctactggagaggccaaggtgggaagatggaggtttaaagccagcctggaacttaaatgacaaacatctaagggtgctggaggtggaagtgtggttcagtggcttgtccaacatgaggtcctggctacagaggggaggaagggggaaaagagagaagtgagggagggagaggaggcaaagcatgggggtggaggggagtgactgctgaagnnnnnnnnnnnnnnnnnnnnnnnnnnnnnnnnnnnnnnnnnnnnnnnnnnnnnnnnnctaagtccttgtctaccccagtcttctcttacctccctgctgccagcgctgagcctggtgctacagagctcctcctcttcacactgagctgtggaggaaagcccacaacaaacaaacccgagctcagctggagagactctgatgcaaaactaagagcaagaaggctttcaaaacaaagcaaactctttgcagcaaagcaaggagcgggtgtctggggacagtcccctggcttgcaggcacaggggagaggccatgccttcctggtcctgactcttcttcttagggacacatcatcaaatgggatgaaaatccatccaggagaccaggggatcgatggcaatctctactgacccaactgtgcctggagcgccggctgctcacatcgacccctcgctctgtctgtggaagggtcaccctctttctgtacactgccttcctcaagtctcctgcagcacccaacttccacaccacagcagccagcctgtgtactccgggcccagtgcctgaccaagtctggctggcctgcctgaccctgggtgcccaacactttctcctgacctggcagaaatggcagaaaggagagggacttaaggggttggggagattacagggcttggccaggatttccccacccctccccccaagatgtcccccccagacccttcccccatctctccactctcatgagctgtttagacagtggttcccccacctagagtgtgtgttgacttagaggcactggcagccctgaggctctggagccttgacttgaagaaacgccaccagtcatttctcccagccaggtcaaggtgagtaaactgacagtcactggcctcacacagcaaggtgcaaacccaaaccactcaaacagggcaaccaaggctgtccgtgacccaaggcaacttgagaaatcaatcgggagcaacctggcccatatgcctggggacccacaaaaaggtaactggccgtctgtgaggtagggcatttgcagggttgttgagggagggggcaaaaccaggacctgcatggggcacttctaagagaccagtaagaaccctaggacaaagagagagggtgtggagccagccagcccccatcccacaaacagtcttgaggcatgactggacatttccacgtgtccttcgatggggacaggaaggtgagaggcagagcgagtgacatgaccacagtctccacagggtcacagtcaagggctgtgaatgactctgggaggcagcaaggtaaggataaccttcactgaggtctccagaaggaccctgccggggctgcgacttctgtgtgctgaggtggctttggtctctaaactgctgaactatgaagtaatgatcacttctgtgacttgttacagaagtatggcagacacaggggcagatgccaggaggaaggaatggacagacagataacacactgccagtctggaagacactgcaccaggccctcgaccacaactatcgagtttatggggaagcaagccctttgctcttggactgaagggtgagactaaggctaggaagggctaaggcctccttgcccaaggcaccgcagggcacgcaggcatggtacttgtcttctggctctgctgttcctgctgagtccacactgaacaacaaaccccaagtcctgcttagccttctaagccagctccttcttggttcaaagccccagccagcctcgaggaccagcctcctctctccaagcctaaggacttcacctcaatcaacccaactctaccctctactgctctcacataacatttcacttctgactctgcaactggaacgtaggcttccagaggtcaggagctgtgtccaaaaccaatttctccataattaaaaggtggggaggggggcgggtgtggtggcacaccttcaacctcaggactcagcaaagcagaagcaagcaggtctccgtgggttcaagaacagcctgtctacaagtgagatcctgtctcaaaaaagaaatttttttttaaagaaaaagcaactagaaaatacattcaaagcatataaacctactatgcacagttcaaaggaaaataaagcacctactcagtgaccagcccaataaaagcagcattcagtgaactccaggcttcacccttgtctcctcttctatactgaagggcacaccctcccaaaagctgggtttgcttttgttgtggtggtggttttttttttttttcttttcttttttttgagacccaggctggccttgaactcgccaccttacctcagtatcctgaatgctggcatcacagccagtacccccagcccactccacttcacaagactgctgagtactgcctgtctaagcggctcatgaggaatccccagtgtcctgagctgacctgcgtcctcctttctggagacttctctaccagctgaggtctgagctgccacgtacgacgatgcgacacgcccacatataattcctgtccacgccaccagcagcccagggtggttttgtgcctttctgtacagggccaccactcaaattcttaatcatgccttgggaactggtgcagacattcaggaagggatgtgctgggccacgaggcactcagggctgccactctaccttgccaatccttcccacagtgacaggcctgcctcacctgcctcacaggtgggtgtgcacactgccgcctctgcgccaccggcaggaacacccaacacttcaccctcaaacaacaggttataggagtggttagtaaagggccaagactcctttgaaccacaagtgctgctgtttctgaatatctgaaacacctgttcccatgtttgctgctcctcctatcatcaggtctcctttcctgagagggaaatgacaagactcctggacacaggctctctctactatctctctctagcagctagcaaggctggagctggaggtctttgtttccaaatcccttcctgtacaggcggggctcatcacgttttacttcatactgcaaaccccggcagggaacctcctcacagtatcttctagaagttctcctgatggaagtctgtagacctggattttgtaatgctggagactggctttcatttctcttctgcaatggcaacacgagccaaaatgctgtgtatacaatatctatggcctcagtaaatacaatattgccttagtaaatcccattagatactgtttgtgccagagctcaagtttccttcttgaagggaaaagaactttgtatcagcactctggcaagccttgcccttgcaaaccctgacattccaggggttccttaccctcctccatctattttaatcaccgattgaatcgacaatgagatggagaaaaaagaacagcaacataggaaccggaacccaggactctgacccaagagccaatacccctgagccccaggtctccacctaggcacagggaattaaggcaagtgcaggccactcctaggctctcatccaaaataagtgacagtttttgcttgcattaaaattttacaaagtgggctcctatcagcctaactcacactagccgaaagatgaaaactgcccaaacgtccgtccagcaatgaacaaaacgtggcccgtgcacgacactgtggaatactgagctctgaaaaggaatggggcatgagcgcacactatgacatgaaaacatgaggttgggggacacaaaagaccattcagcatacggtcacatgtataaagcgtgtttgcaataaggaaatccagagacacagaaaacacaaggggcaagatgagcccaaactgcagcccatgaggtggaatccctttttgtggttgtggaaattatctggaaatagggcggtgaaacctacctaactacaaagttctgaattgtacatttcaaaatggctaaaatgatggatctcgttacatgaattttgcctcaattaaaaaaatatgcactggggactggttagatggctcagcagattgtttttgctgtgcaagcttaaggacctgagctgaggtccccagcagtatctaagagtgggtatgtaagcagaaccaatttgtaatttcagtattgggaagaaaggagcagacgagaggaccctgggggccagtcagtcagtcaaacataaagaaaactcttgagttctgtgagagacgttttctcgaaaaataaggttgcaagtgacagacactgacccgtagcctccacacccacacataaataaacaacactccccccgccccaacacacacacacaccctccactgataaagtaacgttggacatggcgcgtctgtaatattttagcaatgactagggtcactctgaaaaagccatcccacccttgggaatgaagttacaacaccaccacctgtaaaaagcggctaacgcttctcccctacaacgagaattcgatgaggtgacgcataaaaagcatttgcaacagtgccttcccgccacccctcaataaaccggagccactaggcaggatcatcgctcagggttcgatgctagcgacccctattcgtactgacccgagtttatgaagaagctaagagcgctgtccccgcggcttcactttatccccttcctcaatcgcacccgggtgtactacacaagaggaaggaaacggacgcaacgacatcccaggatctcagcgaaggctcggcccagagccctggcaggtggtcgttgagactccccgtgggaacccgaacccgctgcggtcaccgcccaggggtgcggctgagtcctggtagcagaacagggactccctgctagtgtcccatccctccccagtggcgccgggcacggcccagcgactctgcaaaacccaccgggctctgcagaagctgcgcgctttcttcagcagcgcggccattctgcatcagtcctgagacttagaacctacttagacctagcgaccaggaataaaggaggataaagagacaccgacaaaagggccgtcccggggcgtgtcgcctgtgcgagcctcctgccgaggaccaggcccgggacacctgctcagggagctgagcggctgcctagagcgcggaaccagagttccccgctacggggcgcggcggggggggagggcgttcccgagggtcggggtccagggggcgtggccagggacggaagcggggcgcgaggggcgtgaggggcgcgggcgcaatacctgcagcgagaggcgcggtctccgaagcccgtcccgcccgctgcccgcgcggccgccgccccgggacaccacccgcaggtccgctacccacgtgatccgcgcacgcgcccgggtgcagtttcccccgtggccccccctcggctaggcccgccctcggcggcgtaactgactgcgcgtgcgcactggttgccgcggcgaccgggaaagcgttggacagccaacgacgcggaccgtagagtattagggctgagtggtcgggccaggagtgagcatgcaccccgaagtctctgagccgccggtggacagcgtggcggagcccagtctggaggagtcggcaggcgatcacggcgacgcggggccagggatccgtaaagaaggtgccttagcgctgggaagccaaaggggcgagggctcgtgtccctcacacatgcccatttcactcagctggggacaaccagcacccctcacacatacccatccatacagctacaagaacagcacctttattgatatgatcaatccagtacatatagaagacccattatttattccatgataatttattagataccttcctgtggctgggaattgtttgcaatgagtgtaagacacagttcccaaacagtgttcagcgtcattcaacaaaccacaagtacagagagttcatcagctcttgacgttacatttatctaaggcttctagaggcgccttgcagggtaaaagtgcttgcaacacaatcctccagacctgagtttgaatctcagaagtacatacatgcagaggttaagatcaaccatgtgattgctgggacttgaactctcggaaccttctgtagagcagtcagtactcttacccgctgagccatctctccaggccctggaaaatgtctttcatatttaatagtgtgcacagggttctaacatccaaggagagaccagcccagaacaaagcttgcttcttttacacaggtttgagcgatcaaactgatcacaccctgttcttgtgtgtgcttttatcagtgagttgtttttatgttgccgcccctaagttacactttgagcaattaaacacgtttacaggagtgggaactgtaggtgctcacacctggcaaaaggggtaggggggagatttacacagcaaactgcatcacagttatctctgaaccaaagtggggagagacagagctcttgccctgtcccagagctgcccttctgctgtccctggtaagagaaatgggcttgcgggctggaaagttggctcagcggttaagaacactgactgctcttccaaacgtcctgagttcaattccctgcaaccacgtggtggttcacaactataataggatccatggcctcttctggtgggtctgaagacagatacaatgtactcatataaataaaataaatctttttagaaagagagagggggggggcttgatgaacttctgttctgttgagcagattttaacagaaacatctaaactagaattagatttaagtacaactctacttatcttgctgttttctgagggtctggtttctgacgtgtgtgggtgcccaaggaggccagaatagggcatcagatcgactggcagtggcattacaggcacttgtgagctgccttgtaggtgctgagaactaaattctctgttttctgggagagtaacaagcactgttagtgactaagccatccatctccccatcaccctgtatagcaatttgacagtagctttcttagtgactttgtaaatgtcagctttaggctattcctctataaaaactgcacaggagaacataaaactgtggacagagacgttcactctatgttgtttgtaacagcaggaatctgttggcaatacgactgactatctttaaggggttgtttgcagagcagaaagagttcttcttctgccttgtaaacaatgcaccggcagcttcatccatcagcaggaatcgctctcggggacatgcatggggacaaagacacatcccacaaaaagcacaggttcccacttacaaaaatcaaaagcatgacaaccgaggttgtgtttttggctttgctttggtgtctcactttgtagcccaggctgacctcgaaccccacgcccaacagggagcacgttctccttcctcagcctcctgggttctgggcttaccacacctgtccttgaatttttttgatctttacaaattgacacttttttttttttttttttttttttttttttttttactttacagaaattagtgagaccaaggaaacatgtgcgggtccttgcacaacatcctgcccaagtcagcagcaaccaagtggcgacaacgggtcagagggcttctgcacccactcgagagatgacagagaggatcggggccccaggtgtgtgttgtgcaggacatctcgcagtaatagccacttagccccttgcacagacggcgtctgaggagcctgcccagttactaccagagcaggagataaacagcagcagctccttaatagaaagagaaggaggaggtgtcattcgtatttacttatgtgggtgcatgtgtgtgcagggagccatggaggccaaaagaaagtgctgggatccctagggctagaattacatgtggctgtgagctgcctcaagtgggcactgggaacttgtctcacgtcctttgcaagagcagcaaacactcttaatcactgagccatcttatcacatctccaggcggaccctagttctttttgggggaaaagatgaactcatcattggtgtcaggggagactatgaaaaggaagatgggcagacacgcatcatggcactcatacagaagtcaagagacagtctgcagggtccagagaccaagctcctctcctcaggctttgatttgacccactgggccatcttgttatctcccctgctcctgcactgagacagggttctcactctgtagcccaggctggacttcaacctcgtgaacctcctgcctcagtctcctgagtgttggcattaaaattgtgtgctacgggggccgaagatatggctcagcgactaagagtcctgcctgctcttccagaggaccctggttcaattcccagcatccacatgggcagctcacaactgtttgtactccagtttcagggggatccaacaccctcacacaaatgtgcatgcaagcaaagcaccagtgcagattaaaaacagataagcaaannnnnnnnnnnnnnnnnnnncaaacaaacgaacaaaggtgcagataccatgcctggctcacacctgtcttgttgatgacactggtcaaagtgtttttttttttgttgttgttgtttttttttttttaagatttatttatttattatatgtacactgtagctgtcttcagacactccagaagagggcgtcagatcttgttacagatggttgtgagccaccatgtggttgctgggatttgaactccggaccttcggaagagcagtcgggtgctcttacccactgagccatctcaccagccccggtcaaagtgtttttattaggccagacagtgcagggttttttaaatgctgaaagcaacaatattgggtaaagtcctaagaactataaaaaataagggaggagatggtgcggagatagtggggatgagaacttaaatcaggaccccagggcccatgcaaacacccaggcacctctctacatctgtaagagagaactggagaggcggagcaggcgggaggcctggggctcacttaccagccagtctacccgaatcagtagtctccaagttcaatgagagagagagttcatagttcaaaagctatggcagatatgatagagaagacagctggtgtcacacctctggcctctgtgtgaccttgcatacccaggaacacacacaaacagaccaatggagaaaggaggacgaggaggacccgatgtgaggcttcagattgaaaactttagacagaatggatggagaaaagagcctgagcgggtgccatggctcacagcagcaatcccagcggtggcgcaggcaggagagccacaagcttgaggccagcctgggttacctactgagttcccagctgaccctgtctccaaactaaatggagccaaatacaaacccttaactattttttttcacagacgacaagctgaagtgagcgtcttgtgttttgcttttcaacaggatgacgaaacagttccttcaaaagctctgcaagcagcacaagctgtacgtcacccccgccctgaacgacaccctgtatttgcactttaagggtgagtcccaggcgagtctatagccagcgtcctgcagaaaggggggagctggagagcatggcttgcagaggttgtcttcgcgctcagacgctatgcaagtggagctcggtcttgactgagttcctaaagggccttctgagtacagtggagctggcccgccttctttggttgcttggtttttttcttccttgcaaaatagggatggaacccagaacctcaaacatgctaagcaggcacactgccaccagatacaacttcagttagcccgccttccccattttattttgaaacaaggctcaccaaattgccctggctggccttgaactcactttgtagcccagaggaatcttgaactttccatcctcttgcctcactcaaccaagtagcagggattgcaagctggttccaccagacacataactaattaatttaatcacaatatttctcaattcctcacccccccaccgccttgtcccccacccccccttgcaagtagtagcttgttatacgggctgtgctagccttgaacttgtggccttcctgcctcagtctcctgagtgctggcagttcaggctcctgtcagcacagctgcctcaggactgaacattccttttatagcagtaggggcagttgtgaaccatgggcttgcgacaggtgtgttgggaaggacagaaaattagggtggaagacaggggatgagggtctttggtcctctccaaatgcatcctgagatactgaagtactgagaatggcatcctggggacttgggcttgatatccagccccacatctgcatctgagctcagattcatggccagcaccatttagaccagttgatgacctgaatctccagctctctgttggggccaagagtgaagtagctgacctgctcttatcatctatttatctgtgtatttatttgggaagtctttccttagagccttccatgtatgggactttctccgtgctgggaatccagaggtggaggtggcagagatggtttaagagtcctgtaaggtagcacaggcacaagagggcagctgtagggaggaggatgctctgcggggagacacaccaggctcagagtacacaggcctgagactttggaaggacgccccacctgtctccttacttccgccccctctgaaattctccacctggcatctgagcatggcagtggttacaacaacagatcctggggtgggtggggggggaggcagggacttagggagaggggggaggaggagccagcatgacaggctgaagtggatttagactgagaagggaactgggaggagaggtgtctacctcagttacatgtcactagttaataaatcaccctgaaactcagcaacttccaatacattgtctcacataggttctgtagaacaatggcgatctgtgtgtcattagctgggtagttgtggctcggggaccctcttgaggtatggtggaattgccaattgccctcaattacctgagccctgggctgaggctggaaagtggctgtgggccacagcctcagttccccaccatgtaaacctctcactggctgctggctctacatagtgcaagctaccaagagaaagaacaagatggggataggggccccagtaccagaagtgacatatgccaggcttctgccttatctgttgtctcagggccattctcttcttgtatcaacacaaaggcctgtgataaggttggggggttgatgcaaggtcagaatgaaaaaaaaatgggtgggaggcctttgagaggtcaaggagagaaaatattaacaatgggacttatcgataaggatgtcacggggaccccagcttctgcttgtagatggcaagatcgacagagaggctgtctcgagacagctgcttgaggtgctgagggagtaaaggggcttttcctagtgaggaactgggtcaagaactggaaggtgggccagagagagagagaccaatgtcagaggacaggaaacagacacatagaggcacaaaggccagctcagcagtgacctaagagggcttggatgtgcttcataccgggtgtgggggccttaggttcaatcccccatgctagaagtaaaaaacgagggtggggggtggcgttgcaaagaaagctgttattagctaggcatgctggcacacacctttaattccgcacttgggaggcagaggcagtcaggtatttccgagttctaggccagtctggtgtgcatagcaagttctagaatagccaggactacatccagcaatggctctcaatccttggggagtgtcaagcgaccctttcacagaggcagaccatgaccattggaaaacacagggttttatagtacaactcataacagtagcaagattatacttctggagtagcaatgaaaatatttttgtggttgggagatcatcacaacatgaggaactgtgttagaggactcagcattaggaagctttagaaccaccaacatagagagacccagactcaaaaaactaagacaaaaagcatcttagaaaaacaaaaagaagccgggcagtggtggtgcacgcctttaatcccagcacttgggaggcagaggcaggaagatttctgagttcaaggccagcctggtctacagagttccaggacagccagggctacacagagaagccctgtcttggaaacccccccaaaagagagagagagagagagatagacaaatggacagacagacgaggaaagagatgtggggatgtgggtttcttttttttttgcctctgcctcccaagtgctgggattaaagggggatgtgggtttcttaatctctcaattccaagactgaggtggcagcaaattcagtgtctactgagtgctgcttctaagttcacagatggagacttctgtctgtgacctcagtctcagcccaaggtggtcttgaacttgggatcttgttgacatagcctctagggagctgaaatcactgatgtgtgccacaatgccaggcagtctatctgtaaacgggcactaatctcattgtgcaggccccaccctcataaactcctcatacagacacccccccccacacacaaggctccttctcttatcaccctggagggaatgtctgtccacatcagaatttgcagagagccaacaggcaaagcccgcagtgtccaggctcctctgagcacactggaacctcacagctcctccccaccaggctttgaccgcattgagaacctggaggagtacacgggcctgcgctgcctctggctggagtgcaatggcatccagaggatcgagaatctgcaggcccagagcgaactgcgctgcctcttcctgcaagtgaacctgttgcacaagatcgagaacctggagcccctccagaagctggacgccctcaacctgagcaacaactacatcaagaccattgagaacctctgtaagcctggcagcccgggctgcacatcccagctgagtctagagtgggggctgggccaggagcgcgtgtggcacagagtgtggcacacatgctcacttgtgccgcctcccctccagcctgcctccctgtcctgaacacactgcaaatggcccacaaccgcctggagacggtggctgacattgagcacctcagggagtgtctgcgactctgtgtcctcgacctctcccacaatgcgctgagtgaccctgagatcctgagcgtgctagagagcatgccctgtctggtaagtacctgtcacagaatgcttcagaaacttctccctcccttcttctcttctgcctcagaccgggcccagtcagtccccctcaatccctgggaatcaaggtctcaaacagatgggcatagagttggcaagaatagacagacagacacatgcacaagagagtgtgctggttctgaacgtattttgtcaaattgagcatcaaactttttttttaagatttatttttattatatgtaagtacactgtagctgtcttcagaaactccagaagagggagtcagatctcattatggatggttgtgagccaccatgtggttgctgggatctgaacttcggaccttcggaagagcagtcggatgctcttacccactgagccaactcaccagcccgagcatcaaactttttatacagaagaaaatagggaagttaggtgacacagcagccaggtacaatgaggttactggattcttacacaaaacagaggaatgcgaacagggaagaactggcaggaaccaactgggataaaactcaatgttaacagttgggaatcaaaagtagccccacctaaggtccacttaatcttagaagccaggggcaagggcttcgtgcctttgccatagttcctactctagtctattgtatagtccaccttccccctaggccattgtaaatacttgtttgtgaatgggtgtagctcagctacctatagttctaagtatctactctggttcctccttaggtcacaaacttccttcttcctagataatggtaaattcctgtgtagggcagtgacttagctatcgatgcccagggtcggatcaaggaccgcctagaatgtaacttagctatatgtcaaatagaggcacttataataaagcaatattaagggaaagtgaaagaacctagtggggaaacccccactcaattcccgattccgcgtgcacccaagaatcacaaatagaacagaacgccttgatgtaaaaacatgaggtagttttaatggcagagctccgggtcgaaatgtatctcatgcaggagacagtggattcgaccacaaggcttggaagctaggggtttttatagaaaaggggctggggttgggagaattggcgaggtttcacatgattggttcatttaaacatcagcagactgtacatgcagataacatttaacttaggtcagaagggcgggagatagggaggcgccgggccagtccggacatgtcattctcctttctgcaccacctgcaagccttttaacttagcatacagattattacaacaacatgtaggtttaaacacatcatttaagacagtgatgggcatgggagccccataaaggatcttaaaaagagtaaggctgaatcaaaagggagtatttctagttctaaatagggcaaggggaaggagcaccaagtctgcaccagtctcttttagaattctattcatctttttttttttacctgtccttagctttggagcctgtatgcacaatgtaacttctaatcagtccccaatatcttggccagtcgctgatttacctgggcaacaaaggcaggtccattattgccctgattaccttgggtatcccaaacctcgggaagatttcttctaggatcttcttggctatcacattgaccacctcagtccttcaactgcgaggctactgccatccatgtaccagctcaaactctcaggccaaggctgatctgatccttcagatcatttggagtaccagtttcttctgccagaatgtcagtgcaatgatgagtaggtgaagtctcggacagtagggtagtgggagtgaggacagcaggaggagtgaaggtcacttgttcagtcatccatcggtcagggggctgtcggataatgcttttaagagcgtggggtgccactacagttatttgctgtcccagagtgagcttatcagtatccttgacaagcagagttatggcagcaatagctttcaggcaagaaaaccacccgctggcaacagggtgtaacttcttggataggtaaaccactggccttttttaaggtcccaaagtctgaacaaggactcctctggcgacccctgctctctcttccacataaagagtgaagggcttggttgggtcaggcaaaggccaagactggccatcagtagggccttattaatttcttcaaaggctttctggtgatctggggtccactcaaacacctccccttccttggttagggggtacaacagggcagctaaggttgccaacccagatatctagagtctgtagaagccagaggtacccaagaattctcttacttgccttggtgtagttggggtggtgatctgagttacagtctttttttctggctttctttagccactgcttcccgtcttgaagggtgtttcccaaataagtaacttcagtctgacacagctgagcctttttagctgaggctcagtcttctgttgcccaggtttcctgtctagatcctgtcttttctttctctcctaccactgtggccaagtttctagtccaatttctttcttgtctacgatccctccggttttctctttcttctgcctcttgcccccccacccctctctctctctctctctcaatgcgccttctctgcctcttacatgttctactctaaatatttctcattcggggtatctctctcatcttggacctctctaatctctttcatctctattttcactaattatctatctctcctgagtctgctggagctttgctctttcttacagtctaagctcacctttttctagacctctatacccatttgtcagagcctggtacttagactcgtaggtgctccttacctgggacagaagttttaagtgggcggatgtctccttcaatggttagcagcttagggcggggctgccctagaagagaaaacatgtggggctgggaaagggaaggcagttctcacagctgccaactggggggggggggggcgaggaggcggcggaggactctagttggcccctccctggcaggcatcacagccgctctaggaagccaggcggggccggcgcgggcgccccgtgggtctcgcccctctttcttttcttgcccgtcctgcaggctgtgaaatgtgtggtggtggtggggcaggcatcctggggaaacctccacatcggtgttcccccccctgggccacagtttctcacgtggcgccgagcctcacctcggccagcgcgcacctgctgccgccgaagccggaagttctcagtcctgccctgctgctgcatgcggccagggaaacgtgctgagttgtttttcttaactatcactgtcaaattctgtcctaacatcagtctaagtccacagtcagaaacaaagggttgacacacacacagtctgtcccatgacgaaaaccacaacagaacaagacagtaacagagaaaaacaaacacacacacaaacaaaaaaacccaccagtatctaagcacactcgttccttgaacccccaatctcagaactgtaaaaccaagacatgaggtgggacttgaacccacgatctcggaaccgtaaaaccaaggcactgaggtgggactcgaacccacgatctcacaactgtaaaaccaagacacaaatccacaatctcagaacagaaaaaacaagacacaaattcgcaatctcagaactgaaaaaccaagacacaaattcacaatctcagaattgaaaaaccaaggcacaaattcagcagtgccacacttaaacaacagacaacatgtaagacgcacacaaacaatacctccaaggggtctttcggggttcctgggtgccacgcagatctcggtagaacctccaaatgaaagaacctagtggggaaacccccactcaattcccgattcagcgttcacccaagaatcacgaacagacgaccaaaaacatgaggtagtttaatggcggagctccgggtcgaaacttatctcacgcaggagacagtggattcgaccacgaggcttggaagctaggggtttttatagaaaaggggctggggctgggggagaaattggcgcggtttcacatgattggttcattcaaacatcagcagggagaaattggcacggtttcacttggttggtccatttaaacatcagcagcctgtttaacatttaacttaggtcagaagggtgggagatagggaggcgccaggccagtctggcctgtcattctctttatctctctttatctttatggccaagcagcctcaggagtgtcttaactacgggcctgcctgggcatgtcctggcctgttctgctatgttctcagccccaggtttcaaagctcacaaacaactctttgggctatttgacatacattacatgaatcacaggcctcaagttttattttcttttagcacccagtgggaaaggcctctcggcgacctctacatccaacccagtcggtgcctctctgtgtgtttggttattatttgttttgagacaaggtctcatgtggctaactaagcctggcctccatcagccattgattcttatctgtcgccctgcaaatattttcttgaaatgtgtaccagggaggaagaaccagaaacaattagaccaaagtgtgcttcagtaagagatgttgagaaatgatgcttatagaaccactgagctgggaagggctttggggaatactctccagaatagctgcagaagaaccttccaggatagaaaagagggtggctggggagtctgtgcagctccagaggctggctcggcacaggagactcctcctgctcctcatgctccaatctctgccaagaacactgcactgccacagtgttttgcacaagaaaatgaattgtgttgttattctgagggcatgtgatatgatgatgcggtcatcttaggttttattattactaacactgtggtgtgcatgtgcgtgtgagtgtgtgtgtgcattcatgcatgcatgcatgtatgtatgtctgtatgtgtggtacatgtagtatttgtgtgtgtgctggcagggaatgtatgtagatgtgggaggacagtgtttaggagctggtcctcttctaccatgtcagttctggggactgaactcagggtgtcagccttggcagcaagtgcctttacctgtcatagaccctgactgtctggctttggtaatcagtgtggccctgcatgttgctttccagcgtgtgctgaacctcatgggaaacccagtgaccaaacacatccctaactaccgcaggacggtcactgtccgtctgaagcacttgacttatctggatgacaggccagttttccccaaggacaggtaagaaaggacctgggccatgtgcatttgaatgcttgtagtcaagcacacttgttcgactttcaagttttctgatttttttgagcatttcacacatcagtaaatgccctctgtaccccattaatggccccatcactgcccaccacaggaacagggacgcttgcccacagagtctttcctttttacaccagtacactgtagctgtcctcagatacaccagaagagggcatcagctcccattacaaatttttaaaaagatttgatttatttatttttgcatatgtaagtacattgttgctgtcttcagacacacaagaagagggcactggattacgttacagatggtgttgtggttgctaggacttgaactcatgacctctggaagagcagtcggtgctcttaaccactgagccttctctccagccgcccctccttgtttttacaattactctgtgtgtgtgtgtgtgtgtgtgtgtgtgtgtgtgtgtgatggcacacctgctcgcacaggaggtcagcttgcactatgttggttacttctggggactgaacgctgaactcaggtcatcaggctccgaagcaaactcctttccctgagacatctggtcttcgggttttaaatcctgtgactaatgcttctgggggcatttgcatgcgcattccggtgtgggcgtggcttgctccccttgggtagatggacaggactagaagtgaccgaccagatgacagttcacgctgggcctctgaagagccaccaaatgcttttccaaatcagccctgctgttttactttttcttcaacgtggtgacagggtctgagctttctgcaccttgccaaagtcacctctttactcctgctgtgggaggcaaagtgctgccttgtcatgcttgtcatcagcaccttccccgggggctcctgtaaggcaggttttctttctgcactggccattgttgcctgctctttgggaaatgctggccttgtgcctctgctcatttaaaacaacagtgtacttttgaaaaaagcagttttggctgaaggaaaagcagtttcccagtgtgaacatcttgcatccttggggacacttgttaaaactgatggaccaaagttgacataagattagttagtgaactccaacattttagtttagtttagtttagtttggtttttcaagacagggtttctctgtgtagccctggctgtcctggaactcactctgtagaccaggctggcctcgaactcagaaattcgcctgcctctgcctctcccaagtgctgggattaaaggcgtgtgccaccatgcccagccatctccagtttcttaattttgaagaaatgagtgagttcgggggctgaggagatggctcagtcagtaaaatactttcctcacaagcatgagaacttaaacttggccccagaacccacatgaaaagctgggccctgtggcaggcgcctgccattgcagctctggagaggtggagacagtgtttctagaatgcgatggtcaaccagcctagcccactcggggggcttcaggtcccaggaagagaccctgcctcaaagataagggggatggtgcctgaagagggaagacacccaaggacatgccctggcctccatgcacacattcatacatgttcatacatatacatgtacagacagccacaagactaaggaacgagcacgtttggccagacagcatatgtttataattttcttttaacctttacaagttgtagggagcctgatagagacatggctcagatgttgggaaagaacatttgatgttctttttttttttggtttttcgagacagggtttctctgtgtagcccttgctgtcctggaactcactctgtagaccaggctggccttgaactcagaaatccgccagcctctgcctcccgagtgctgggattaaaggcgtgtgccaccacacctggctacatttgctgttcttgcaaaccatcccaatacagtttataactaactacctctaattccagctcttctggactctgatgtcacctgcattcttctggtatgcatacatacatataaagtgaaatataaatacacctttaagtaaaagagttaagtgaaccctagatcctctttctctctcccttccccacccacttccctgcctccctgggtctcccacgtcccgggaaactcatttagcccctgctggcctccaactcaaggcactgttcctgcttaggtgtggacagccgtgcccacacccagcccccaggtctgaccttcgtccttccttccctagggcgtgtgcagaggcatgggcccgaggtgggtatgccgccgagaaggaagagcgtcgccagtgggagagcagggaacacaagaagataacagacagcctggaagccttggccatgatcaagcgtcgggctgaggagcggaagaaggcaagagatagaggtgcgccctggaccacagctgtgcacagtgtgacccctttcacttgaccctgctgtgtggtctaggaaacatacaaaggtcagacactgcagatggagcagagagaaactaatgtaggatcggttctttggtggacatacagttctctcattaatgagggacgctgatacgcatgctaatgaatggatatacgcaggtcaggttttacataaagaattaagaccccgggtgctgcagagatggctcagcagttaagtgcaccggttgctcttccagaggacctggatttgattcccagcacccacatggtagctccagtcctagggaatctgacacccgcttctggctcccatgaagggcactacagtcaggttttccttagtctcacagttgcggggctgagggctctgattgacaggaagacatagcacaaaagggcagaggtgtctaggactccttcaaaacgtgttgaaaattctgtcttaacgccaagctgaaattcatgggatgaggtttttttgtttttgtttttgttttgtttgtttgtttttcgagacagggtttctctgtagccctggctatcctggaactcactttgtagaccaggccggcctcgaactcagaaatccgcctgcctctgcctcccaagtgctgggattaaaggcatgtgccaccacgcccagctgagtttttaattgtatgatcagtgcgtgtgtgtgtgtgtgtgtgtgtgtgtgtgtgtgtgtgtgagcgcgcgtgcgtgcagtgagcagtattagagcctttcacaaaattcctgaatccttcctgggaccagggctagtctgcagctgtcagcctgtgtgaccctgggggcatactcaaaatgacctttatcagcaagactacaatttaaccacacatccttgtaccagtccagccttaggcagagctccaacttcaactttggactttacttctctaggggagacacccctgccagacagcgaagggagtatccccaccagcccggaggctgaggaaaagcaacccatgggggaaatccagaagaagatggagttgtttgtggaggagagctttgaagccaaagatgaactgtttccagagacgccaggaggagaaaaggagctgcatgtggttgtggtgaatggggcagtggagaatccagacctgtctgggagcctggctcacaaccagacacctgtggtggtcaccccggaaggtaaggcagctgagaccaaagagggcagcccctgaccctgcacagctatgacccctgaccatgcacagctatcacccctgaccatacacagctaagacccctgaccctgcacagctatgacccctgaccctgcacagctatgacccctgaccctgcacagctatgacccctgattctgcatagctatgacccctgactctacatagctatgacccctgactccacacacagctatgacccctgaccctgcacacagctatggctcagagtctgattccactgctgtggttctctttttagaagacaaggtccttgggaaatcttatttccaagggagaagagtgcacctttggaaacatgtcacattaaaaccagatgaaattatataagtgtcagggaaagctattggcagactatttgactaaagcccgtgggtcattttgaatcaatagaaggagcggtgatgttttcacaagcactcaggacctgctcgcagcccagggaggccactttcattataaatggtagactcattaaaaatgtagagctggaaagatggagacaggtggatcgctggaactgtctggccagccaacctggctttatccatgagccccaggtcccaggagaagaccctgttctagtttgctttctgttgctatgataaaatactcttaccaaaatcaaataggtgtggggggggggtggggagggaggattttgcccagcttacacttccaagccatagtcatccctgaggacttcagggcaggaattcaagcaggaaatacagaccaagctggctggctaggtctctggcccatgctcagctagctttcttatacagctcagggccacctgcccagggagtggtgctttgcagtgtgggctggatcctcctataccaattaggaatccagacagcccctaggagacatgcccccaggcctgtctgatctaggcagtcccttactgtaggcttccctctcagatgacttgaggctatagttactgataggtaacccaggactttcccaggatgacacaggagctggttggggatggcttgtgtgtgcacagggctatgggcacaaccttcagagccccaacctaacagggtgtgaggtctggcccagaaagtaggccctgctgctagaagtctgaagtgctgtgttctcactaagggatctgtaaaggagtaggtgccagggttgcaggaattgcaagtgaagggagctgggcagggcagagcctcagcaacccacgcagctggaccttagttcagtctcgagtccacactgctaaaagccaaagatttgaactaagaacagccacctgtctttgttttgcaacatcttcaaaaaaacaaaaacaagacccgggatatccaagtcctttttacaggatgtgtgggcttggggcaggagtacctctggctgctcccaggaccttagggttagtggttctagtgtgggcactcaggtatcccaggcttaagagagctaggaaatacatacaggacagaatgcagcgagaggcatgcaagggcggtctatagcagagtgaggcagggagctcaggtatcccggggtatgtgtgcagcaagagaggcaggagccaggtaggagtggccgtggtgatggcaatggcacatgccttaaatagggaggcagaagcaggcagatctttgagttcaaggccagtctggttaacagtgagtttcaggtcagccagggcaacacagaggaaaccctgtctcaaaacaagacaaatcaaaactggagagaggccaggcgtggtggcacacacctttaatccctgcacttgggaggcagaggcaggtggatttctgagtttgaggccatcctggtctacaaagtgagttccaggacagccagaactatatagagaaacactgtctccaaaaacaaaaaaacaaaacaaaacaaaaaactagagagagatggtgcgggggtgggtactggggagcgccacagcccagagaaacctgctttggtgccctgccctgcatgctcatcaggtatgctgtggtgctcctgggtttgacagggttctgtgccagaatgtctgtctgggcacatgcctttccttggttgttgcttatgcagctagggaaggcttgctgtctgtaggtcagagcccgtggaaggcaaactgtcaggcccttagcctgctgtcttgagcttctgggacaatgtttctgttcagcaagggtctggcttgtcctgtggctttccacaaatggacattctctggctggtatttaaaggtatagggctcctgggttcagcatttcgggttctctcaccatctctggtagaaatgtcacaagatggacttcctggctcagccattcctctgtgtccagcagtgtgagtggatagaccacacagggacacggcttaggaacttggcaaggagggatcataaataacacttccacccatccagggagcctggctgtgttagctgtcacaggccctgaccccggagagcaggcagccatatacttggtgcacaggcagtgcaggctcacagtgaggcctctaccagggctggcctctctggcctttggaaccggcacttgtcctgcttgttccttttcctgctgggcagtcaggctatctactctgggatcggctgtttctgcagtctctagactcccctcctgtcacaatagggccagcttcttctggtcctttcccttttccctttcccctttccctttcctttcctctttcctttccttctttcctggaaggtcagtccttctaccataaccactaggttgtcaccccaacctttgtgtctgaaaccagtgctgtgccagtaacttctcaccactcttcatcagagtctacatctccagtggcagctactgatggggccagaactgaagatatagaggccgttgccgtggagatcaaggagaggcttttcattgatgtgagcaggggacttccagctgagggtgggctgatgcctttgtggtcctcgctgtaccacgagtcccccagggagcaggtctatcccagccaacaaagcataaccccagccactctgctgagactcagacttgggggtccattcacctcacctgggctgtgcaagtcacactggaggctccagggacattacagtgcagagcagttctgtggccagccctaaggtcacactgaatctcttgagtctgctgggcctcacacccagtcgtgtgggtggttctgaccacctcattggctggtctccactctgcttcctgtaggttcaccatggtgtgattgtctagggtccctccagcaaatgttgggttagagctatgttatcactccccaaagctcctcctatttaatgacaatacaatgtatttcctgcatgcaagacatgagaaagcacacactgtcacattgtcccaagagctgcaattcagtggagcaaacccatgtgaactgaggctcactctgcctgctcaaagcctcagctttgaattgagaactgactgtccagggcacagtgaagacgtagtggagtctgagactgccttgctcaaggcatggtatggtcagggctctgagataggtaggattatcatcccaatattacagagtaggaatgggagaaacagtggttaaacagtttgcccaagaccacacatctaggaaatagcgctgtggttttctgagtttcaggaggtacacgaggcccagactaatgtgtaacaggcacttttgagttccctgtgacagaacagagtgaagaagctgtaacaaccagctgtgcctagcctgcaaaccctcttcaactacccacacttgaagtgccagtgtggctttgagcatgctgaggtctggtggccatgggtaggagctactgaggggccttggtgacagttcccttgtctcctgttgatactttcttccactgtgtctctggatgacaatgtatgtggtcgctgactctttcaggaccttcctgacttggaagatgctgagggtacagatgtgtctgtggaagaccagataaaggtcagcatccccttccctaaagcccagactggcctcaaccatggcagccctcacctgcctctctccgaagtactgggcttagaggagtgcaccaccgtgcctttcccttagaagccatctctctctcctgaacgtgaactgcccttctgaggacattgctccttctgaggacattgctctctggtccctccaagggctgatttcaatgacttgggcttcctgctgcaagctctactggtggctgcatgaaatgaactgggcgcatcctgccttgagctgtgctcccgtgcacacggcccaaactcatctaaagctagacggaagggcgggagcacacaggcaaggcagagccaggaaccagcaactgtcagacccagaggctctggaggggatcttttcatgagtgagggtttcatattcccaaatgagcacactggccacagctctgcagggaccaaggtcgtctaggaacaatgtctgaagagttgttgggctctagggtgtggcagaggctaggacccagcattggtggggtgtggtatggagtgagtgaagcacagagaatctgctggctgaggtgtttgttcatccagaggccctgtagcagcctgctgcctccctaccctgcctctgcttccctgcattgtgaccaagggaatacacagttgacattctctcaccaggagacagacatcccgagaatccaggccatttccagcttgagtgacgacagtgacccggagctggacgagctgtccctctccacgtctgaggccactcccacaggcgccacaggtgccctctcacacatatttgccatctccaagggcccctccacggcagccacggtgcctttcacagacatatgtaagccaatagcaacaacggacttagaaagccaaggtcaagactgcggtgcagcggcctcacgccccctcatccaggagctcaatgatgagccggcagaggaagcagcaaaccagccactgccgccccaaacctgtgcgagtgaccctgcacttgcccaccctagtgaagatggagacagcgacagccagctgcctgcagccactctgctaggtaacaccctgtgagaggctatatatagggaggactggagcctgtgcagctggctgaacctcagggagcagatgggcatttctgcccattcctaggtctggccgtggtgtgtcacctggccccatggttccaggccagaggctctggaagaggggaccacagacactagggctgagtgacaaaagcactggtgccgtgtgcaggcacaggctgtctgggcagttagcacaaacagaagagtaccccaggttgggtgtgcattttaggtacgtgcttttggggtgcttatgctcccggtgctcctcttgcacaaggggacacacacacacacacactcacagtagagtgaggaggggtttctgatctcatcagaggagaatctgactggcagccatgtgggtcttcaagtgtttataggagtctgtgctggcccagcaggaagggcagctttccccgagtactgattggttctctcccaactcttcaggagatggagcggaggatgaagcagagtcttcggtgcacccgaaggagcccagcacccgggtaggcctagaagatattgaatttggcttggactgaaccccaaggcagtctacattgttgggctagcggtggcgcagcagatgcagggcaccctctcccgtgcatcactgtgctcttgagcctgcaaggcaggtgcgtgaagctacaccaatgtgccttgtacccaacacgtcggtatcccctggttacagaccccacaagaacataaacactttaagacgcacacagtcagcacgttattgggctgccagtcaggctctcttctgatgaggtcagaaaccccaccccaccacactgtactgtgtatgtccccaaggtagaatgagtgggctttacacaccagacacatctgctctgcccacataaccatctgctcatggccagtggacaggtttattcagtcccagagtcaaagcgtcaatgcctactgaaccaatgtacactgtggcacaatcaacctccaacagctgacccacactgggctacctcggggagcacatgagctggggcatctttgaggacaggaggctaaggctactttctagcaaccctgctgcactgaggtgcagggggtggctctaccctggagacgtagccagatccccaagctacaggagctggcccttggtcgtggctgctcggagcttctgtggcatggtctcctggctctttctgcagctccatgtggcccagagaatggcagtgggagaaggcaggagactggggggacttgggactgcagggactcagcattagccatcctgatgcagcctctgcagccagctctcgggaatatcctaccatcaaatacacgaagtggactggttccccattgcttcagcctagttctacactgctcacgtttccatgggcacactgctctctgcatggcagaggcagaggaggctctgccctggagtggctgagctcagtgcagcactccaggatgaaggctaggttctcagatatggctttccccactcagaagcccattcgtggcttcttctggggaggctgggagccagagtggacaggcgtctgctgcctgaaagacatggtctggaggctagaggcctgggagggtggtgtagccacaggtcctggagtgtccctcttaagtggcagcttgtccgtgtgatcccggagggtctgccggcgttcacgcttcacaccttggccccacacctcctgtgtcaactcctgggagggtggaaccctgggtgactgaagacgggcctctgaggtagagaggtcttggctacgaggggcactgctggcatctggggagtccaggtagcttgtgaatgaggagaaggtgctagacaactgagtccgccgcttaggccgcttggactgggtctgggtctcggaggtctcacctcgatgtctcctccaccaggcagtcacccggccttcccaggcttctgtcaagcgctcagtgagctcatcctgttggctgcactgaggtgcagggggtggctctgccctggggagtgtactcaggtccccaggccgcaggagctggcccttggccatggctgctcggagcttctgtggcatggtctcttggctcttctgccgctccatgtggcccagaaaacggcgatgggagaaggtcggggcgacccacaatggacgagtgggggacaactccatcaggtcctccaaccagcggctgcaacgggcactggcctgaggggtccaagagggcgtggacacctggtccactgagggtgctgttgcttgctctggcacctttctaggactggaggcttgcaggagccgtaggtgctggtagaagacatccccggctgctgagagctggaagagcaacagccccggggcagaggcacagagggggacagcagccagacctagacagggaaggaggagagttgcagagcctggcagcacctcccactgcagccccaagcccctctgcccagtgtacctatgactggtgcctccagacgttcctgcagcagctgctgcttcttaggttccagcaggggaaaggcagagagggattcggtgatggagggcagagactgaggaggccccgccagctgtggcatggaagttccctctcctggagaaaggacagagagctaggcacaccagtcccagcactagcatgtccccacgagcccccacccggcccccttacccccacctgcctggctgacctgttatatgaagcagctgcagctgcccaccctggccccccagtagcaggggccgtggatggccagggctagctgggggtagcaggcgggcaagcaggggagcagatggcaagccatggtcccacttaagcatgggcaccagggggaggcgctcatccatcaggtagatcgagaactgaggaagaagagaaaggtgagactagtggatacctggtaccagcctccaataaccctctccaggccacacagcctgcaggaggtgcccaacacccagaggacagacggcacccccaccagccttcaagtcccgcccaacttggcctacccaacctaaaacatgtattttctgggctgggttctcagaagtccctgacatccatccctacactcccaacagtagacacttgcaccaactggggtcctgagccagagtcaacctctgctgcctcccagctcctgatctaggtttgcagatgacccattccacctgcctctagggagaccacctgcacggggacccatcattcctgggttcctgtggctgtgcctcaggcctgctggccgaagctctggtgaagcctggatcagagcccaaggagaaagaaggctgccgctcacctgggtgcagatgagatgcagagatggaggggtctgacctggctgccctaggtactgggcaagcagcacccgctctcctttctggcaggcagcctctgctccagcgcggaacagcagcagcccacagcccggtgggccctagacgaaggacagcatgctcagcctgagtcttcaggctggagatgggcctcccgcctcctgcttctcctcaccctctcaaccgatacctgaatgtcaaccattttcacacccgtgcggtcccccacagtcagcacccgggggtgggcagtgaagtctgcccagcgccagggagacggatcacggaaggcaagcgtctcggtgtccttgtagatcgtctgcagccttgaggaggaaggcaggccatgagtgtgggcctggtgggggctgggggcgcaagggtgttgaggggctgggctagagggaagggagactagggccatggagcggaaggccgcggttctgctttagaacggaaggtttggggaagagtagttacccagcttgtggggtccacagacaaacagctccggaacggctgcagatggccagctctcctgacaggtgagggctacagagcacagggtgctgcattatcagccagcaatgcagcccttctcccagacccttgtccgcaccgggaagcccacatcctttacctgaggctaataccagtggcccctttctccacctgcatcacctgcaggagtgctggtggcccctgcttatcaatcttccacgtggcacagtgatagtcagagcggacggccagaagcgctgggggggacagggaggtcaggcctgcggagtgtgtgtgtaggagggtgatggttgcacaaggaagagggagtgaagaaatcttactttctccctggacggtgctggtcaccacctgccgtacaggtccccgcagctggacgtgcccagggttctcaaggatccgggggttgccacctgaagtcacactgacctcctggaaatctgagcccctgattaaggactgggggtagattctggttgccccggctcactcttttcctggcccaccctgtggatggtgtcagcatccccaccaagtgagaaaggatacacagcttgtccaaggcacctccactagggtagaccagctgtccggcccgcgctgtccttccgggcagccaggccaacgcgcccccggtgaaggcctcatccatcagcagctgctcccagcgcatggccagctcttcatgcagtagcttccccatgagtagtgacactgacctgctcaggacaggacccccaacgatggagaagcgacgcagccggcggctgagggaagcccagggacacctagggacagagcagcagaggataacactgggacagtgaaggacacgcagagaacctcttccttagctgcctagaatatacccttccctgttcctggaccccaaaccttgaatatctcggtgcctcctagcaagtgcctcgcagatgttcccagtcaaggcaaccatagacttctgggggttgtgtggtagctcggaaactgactcttcccttggaacaagtagccatcctgttgctgcttgagtcaggtcaaacagagggatggaagtggacgagagagccctgtcaacactccgaacacctggatgtagccacgcctaagggttttttttttttttttttttttttttcactcaaagtgattttattgcttgtgcacacaacagcgtttatgccactagagcagaggctgtggatgactcatatttccaattgggtgggagcacccgcttagtcttatagtatcgagccaatcggtgaattctgctctctatcagaatcaggcggaatttagcatccttatcctttctgttcctctcaaggtgctttcggacagcaacagctttcttaatcaaatggtagagatcctcggggaggtcaggggcaaggcctttggacttgaggattctcaagattttatttccagtcacaaaacggacctgggccaccccgtgtgagtccctcaggattacacctatctgggagggagtcaggcctttcttgggcaatttgtaaatcttttccttcacgtcgtcagacgtcaacttcagccacgtggggacgctacggcggtagggcagcgccgactgggacaggcccttcccgggagcgtgcatgcgacccatgatggtggaggtctggcagcccacgcctaaggtttaccaatgaccaatctgcttttcccttacgctgccggggattttgtgaactcatggctcaggactgtgtggggctggaaaagccactatgacgaaaacctggtcagtgtcccaggtccttccacatctcacggcaggccagtccatggctgctctctcattggctacttgcccccagggttggtgtccgccgaggtcctgaagcagcttcttcgcgctgactatagtcatctttttcgagtagccctgcagggaagggctgtcaggttggtacccttgggtctcaccagggaggcggctgaccatccacccggtggtggcggctccttacccggttcccctccaatctgaagttctccagcatgagtctccccaggggtgcgaaggctatgtccccatggtcccacaggaagcggctgagctggagggaacagctgtgtgagtcagcatagcacaggcgctgagaaccagtctcacccagggacacttacctgctcagtgacatccagcacagcctgagactggtactggtagcagtgacctccccggaaaaggaagtcctgagctgtcacaccagggtcccagggatctaaggggagaaggagatcagagaagaacctgagaaggaatggggacaggatacccctggaggtctgaggttccccttgtgcgtgtgatggctgaggtccttggagggggcccaaaaggagagagactcttaccaggatcaggaggcatcaggagggggaggggtcctggcgtcgatggctcccacagtaggttcttggcaaaggacaaggtcggatcctagggaaacggggcagcaataacatgacaggtgtgcaatccctgccaattaactaactcagtcctcgggacaaatgtgaaaaggtggtcacttcgctaatgaggaaccctgaagcatgaggctgccgccctaggtgacagaagcaacaaacaggcatggacttgaacccaggcaaccgactccagagtctgaactgaattctaaacttcattcacagcagctttcaaaggaagcgcctaagtcatgactgcctacccacaacccaatgagctccaacttcctcagctatctcctctgagtcctgccattcagtgggcacccttgtcccaaggaccaagaactcccctcccccaacaccctctctttgacatgctctcctcaatgtactcaatacaaggctgctagagatggacctcccaagagcagaaatcctgcccctggcattccactaattcaggcaagtcaaggccacactataaaaggtctgcccgttggtgtacagtctctcaccataactggaagtcccttaggtggggttgcctgacttcctcatgctgggctcctgggcctgtaaggaccccaacacataaacacctgctgaacccagggagagggagcgaggaaagaggagccacagcctctgttgagagacactgtctggacagcagggcaaccggtgcgcagctcaagtagcagctgcctagacctcttttcccaataagtgagcaaggaggaggaacagaccaaggaaaggaccctatttccatcctcaccttgcagttctgtggctgggaccctggcagggtcagtgcatctctccagctgcacatgaaggacaggtcagggccatcagtcatgccaagtggaccggccttaaacaatgaagggcgcagggtgccagggaagtccatcctggagagaatgtatctaacgttacacacgccttcattaggagtctcaacagtgcaccagggttctcagaacacagtaggggagaccactacaaggtagcagataaagaccagactatgcctaatgccagcgcgtcagcagggctgcccaaggactgctcactctcttgagggcagccagacagatatctctgctcacaccttggaagaggggctggggagaaagtgatcgcaaaaggcctcgtggcaggtaaagtgccaaagagataagcaaccacagaatatacaaaggggagagtgtggaggaccaagtgatgccgatgaaggctgagcgttcatcaacgcgctgcgcatgacagtagcaggctgactttcttccacccctctgtggacatgggctgcgtactattcctgcttccccactgccaaacacaggcttctccgaaaatgcccgtgggctgaataaatgcaggaactctttagaagcagtaactgtcaagtcagccctcatttttagtaaaaattaaatctaacatccgcaataagagcaccagcagagcactagtacccgctggacaagacgtgaaggcgctgaatttagagtctgaactgaaaaccggtgtgtagtaaccacaagtgttcccggaccgccctccctcgtggccagcatctaggacgagcctcagcgctgtaatcgaccagtctctatagccacgtggtctgccacgtgctctcagcattcccgcaacagcctcacctgaccccggggccgcaaaggagccagagtgccgaacctcaacgccgccacccacaactgttggagcagactaaactgttttccggatcaggccggaagttcgcccgagaaacaggaagtcccgcccccagatcatctaaccgagtcctccagcgccacctgcagagctgagggccaatatgcatggtcgtggcgcctaagctatgaaatttccatcctatttcacaaaagtgttgagaagcttgaattgatcctctcaacgaacaagtgagcacctccgatgagccacgcactgtatttattacccacaagtcctagaatccgcttcatagacacctctgggtgcatgtgtggctttaacaggggccaggagggaatattagcttgtcattctcaagctaatattccttgtgtgtgcacctgcgagttttgggggatctgttcaaactcgctcgcatgcagcgagtcctgggctctgcctgtaagttgccttggtcctgacactatcgcgtaaaacttaggacgcgtggctctgctgaccacttgctttccatcgcctggaggctaagaatatcttcagatagaatcgagacaaggaacagattctcctgcgtcactgcaacctacctacatgacattcccgccaatgtgtttgacgacttctttgggtttgactttcctttgtcctgtaattatcagaacttcataaatcggtcttcatggtggagcaagttattcagggagaaaaatctgtgttcctgagtttattaagggatctctaaaggaacagaactgattgaatgagtatggaatagaggagattttattagaccggcttacaggctgtgatctgcgtagttcaataatagctgtcttatgacagaaatggcaaggagaatttggtactgttccgtccacgaggctggttgtctcagcagttctgatctggtgctgtagtcctgggccattcctaaagagccgccgagcttcagtctctgttggaatcctaaagaaattgatttgaatactgaaaggaaaacttcagcaatgccataaaataaatggttttgccggtgagggtgaggtccagcaggcacaaatcatggtttctttttccatttcttttatctgggctgccaccagaaggtgatttaggatggctcttcctccttcaaataatctgattaagaaaatccctcacagggctggagagatggctcagcggttaagagcactgacagctcttcccaaagtcctgagttcaaattccagcaaccacatggtggctcacaaccatctgtaatggggtttgatgccctctactggtgcctctgaagacagctacagtgtacttgcatataataaataaataaataattttttttaaacttcctcacaagtgtgcccagcagtttgggtcccagttaatttcaaatattcagttgaccaccaaaactagccatcatatgggggcatgctcgttggtgtctatttggctcatgcataactttattactattattattttattgatttttttttttgagacagggtttctctatgtgtagccctggttgtcctggagtttgctctgtaaagcaagttggtttcaaactcagagatctacctgtctctgcctcctgataatgggattaaaggtgtgtacccccatgtctgactgtcagctgccttctctgtaagatgagggctgtgtttgagtcaacctctttcccattgctgggtaatacaggaattccctgcttatggctttagcaccactgtctagctagaaatgcaccattatccctgtatcttgatatcaaggtacatcaggggctacctagaggtatgttaaagcagtttgctgagcagttgggtgtggtaacacacatctttaatcccaccctcaagagacacagaaacaggcagatctctgtgagtttgaggccagcctggtctacagagcaagttccaggacagccagggctgttacacagagaaactctgtctcaaaacacaaaaacaaaaacaaaataaaaaacagtttgccgggctgagtgtctaatttagtgggtctggggtaacactgctgacccatagcccacataaatgagaaacactgctttaaaggatcaatttgtgtggggtgtggtggtacaagcctttagtcccaatacttgggaaacagaggcagctggatcttccagtttgaggctagtctggtctacagaatgagttcagggacagccagagctacacaaggaaaccttgtatctaaacaaaaacaaactaacaaaggatctgtttgcaaggagccaggggagggagctcagcggtatagtgtctgttggcttagcatgcacaaagccttgggtctcattcccagcaccacacaagccagtggtggctcacatctgtaatcccagctctcctctctgcagaagagacagaagaaccagcggttcaaggtttttttggctacatagcaagttgaaggcaagattggaataaattgggccctgttttttgtgttttgttttgttttgtttttaaatcaatttgcaagctgggcagtggtggcccaggcctttaatcccagcacttgggaggcagaggcaggcagatttctaaattcaaggccagcctggtttacatacaaaaaaaaaaaaatcaatttgcagattgtcagtttccagctagtttgtgtttggaaagttccgggagtcagatggcctccttccatcttccctttcttagtgttttctctcatggagtgctgccctacaggtgccaaacaggaggatgccaggagacagaagatgcactgcttgaggcccctgaaagaaagcaagtttcattaagaaaggataggagacagaggagaggaagggctttgtggatgactggtgtctgagtgctgctcacgcggtatcctgtcccatcccccaactgtttgtacctattcgcctcagtaaaggaggcagtgcaaactcaaagaaaggatcctgttcaaatctggctcagtgaacagaggagttcattggagtttctttctttctttttttcttttttctttcttcttttttctttttctttttcttttttatttatttatttatttatttgttgttgttgttgtttttcgagacagggtatctctgtgtagctctggctgtcctggaactcactctgtagaccaggctggcctcaaactcagaaatccgcctacctctgcttcccaagtgctgggattaaaggcgtgcgccaccactgcccggcttcattggagtttcttatggaagggtgggtgatcctccaaa

SEQ ID NO: 2159 - DNA, 2821 bp, Mus musculus
ggcccgccctcggcggcgtaactgactgcgcgtgcgcactggttgccgcggcgaccgggaaagcgttggacagccaacgacgcggaccgtagagtattagggctgagtggtcgggccaggagtgagcatgcaccccgaagtctctgagccgccggtggacagcgtggcggagcccagtctggaggagtcggcaggcgatcacggcgacgcggggccagggatccgtaaagaagaaattagtgagaccaaggaaacatgtgcgggtccttgcacaacatcctgcccaagtcagcagcaaccaagtggcgacaacgggtcagagggcttctgcacccactcgagagatgacagagaggatcggggccccaggatgacgaaacagttccttcaaaagctctgcaagcagcacaagctgtacgtcacccccgccctgaacgacaccctgtatttgcactttaagggctttgaccgcattgagaacctggaggagtacacgggcctgcgctgcctctggctggagtgcaatggcatccagaggatcgagaatctgcaggcccagagcgaactgcgctgcctcttcctgcaagtgaacctgttgcacaagatcgagaacctggagcccctccagaagctggacgccctcaacctgagcaacaactacatcaagaccattgagaacctctcctgcctccctgtcctgaacacactgcaaatggcccacaaccgcctggagacggtggctgacattgagcacctcagggagtgtctgcgactctgtgtcctcgacctctcccacaatgcgctgagtgaccctgagatcctgagcgtgctagagagcatgccctgtctgcgtgtgctgaacctcatgggaaacccagtgaccaaacacatccctaactaccgcaggacggtcactgtccgtctgaagcacttgacttatctggatgacaggccagttttccccaaggacagggcgtgtgcagaggcatgggcccgaggtgggtatgccgccgagaaggaagagcgtcgccagtgggagagcagggaacacaagaagataacagacagcctggaagccttggccatgatcaagcgtcgggctgaggagcggaagaaggcaagagatagaggggagacacccctgccagacagcgaagggagtatccccaccagcccggaggctgaggaaaagcaacccatgggggaaatccagaagaagatggagttgtttgtggaggagagctttgaagccaaagatgaactgtttccagagacgccaggaggagaaaaggagctgcatgtggttgtggtgaatggggcagtggagaatccagacctgtctgggagcctggctcacaaccagacacctgtggtggtcaccccggaagagtctacatctccagtggcagctactgatggggccagaactgaagatatagaggccgttgccgtggagatcaaggagaggcttttcattgatgaccttcctgacttggaagatgctgagggtacagatgtgtctgtggaagaccagataaaggagacagacatcccgagaatccaggccatttccagcttgagtgacgacagtgacccggagctggacgagctgtccctctccacgtctgaggccactcccacaggcgccacaggtgccctctcacacatatttgccatctccaagggcccctccacggcagccacggtgcctttcacagacatatgtaagccaatagcaacaacggacttagaaagccaaggtcaagactgcggtgcagcggcctcacgccccctcatccaggagctcaatgatgagccggcagaggaagcagcaaaccagccactgccgccccaaacctgtgcgagtgaccctgcacttgcccaccctagtgaagatggagacagcgacagccagctgcctgcagccactctgctaggagatggagcggaggatgaagcagagtcttcggtgcacccgaaggagcccagcacccgggtaggcctagaagatattgaatttggcttggactgaaccccaaggcagtctacattgttgggctagcggtggcgcagcagatgcagggcaccctctcccgtgcatcactgtgctcttgagcctgcaaggcaggtgcgtgaagctacaccaatgtgccttgtacccaacacgtcggtatcccctggttacagaccccacaagaacataaacactttaagacgcacacagtcagcacgttattgggctgccagtcaggctctcttctgatgaggtcagaaaccccaccccaccacactgtactgtgtatgtccccaaggtagaatgagtgggctttacacaccagacacatctgctctgcccacataaccatctgctcatggccagtggacaggtttattcagtcccagagtcaaagcgtcaatgcctactgaaccaatgtacactgtggcacaatcaacctccaacagctgacccacactgggctacctcggggagcacatgagctggggcatctttgaggacaggaggctaaggctactttctagcaaccctgctgcactgaggtgcagggggtggctctaccctggagacgtagccagatccccaagctacaggagctggcccttggtcgtggctgctcggagcttctgtggcatggtctcctggctctttctgcagctccatgtggcccagagaatggcagtgggagaaggcaggagactggggggacttgggactgcagggactcagcattagccatcctgatgcagcctctgcagccagctctcgggaatatcctaccatcaaatacacgaagtggactgg

SEQ ID NO: 2160 - protein, 628 aa, Mus musculus
MHPEVSEPPVDSVAEPSLEESAGDHGDAGPGIRKEEISETKETCAGPCTTSCPSQQQPSGDNGSEGFCTHSRDDREDRGPRMTKQFLQKLCKQHKLYVTPALNDTLYLHFKGFDRIENLEEYTGLRCLWLECNGIQRIENLQAQSELRCLFLQVNLLHKIENLEPLQKLDALNLSNNYIKTIENLSCLPVLNTLQMAHNRLETVADIEHLRECLRLCVLDLSHNALSDPEILSVLESMPCLRVLNLMGNPVTKHIPNYRRTVTVRLKHLTYLDDRPVFPKDRACAEAWRGYAAEKEERRQWESREHKKITDSLEAMIKRRAEERKKARDRGETPLPDSEGSIPTSPEAEEKQPMGEIQKKMELFVEESFEAKDELFPETPGGEKELHVVVVNGAVENPDLSGSLAHNQTPVVVTPEESTSPVAATDGARTEDIEAVAVEIKERLFIDDLPDLEDAEGTDVSVEDQIKETDIPRIQAISSLSDDSDPELDELSLSTSEATPTGATGALSHIFAISKGPSTAATVPFTDICKPIATTDLESQGQDCGAAASRPLIQELNDEPAEEAANQPLPPQTCASDPAHPSEDGDSDSQLPAATLLGDGAEDEAESSVHPKEPSTRVGLEDIEFGLD

SEQ ID NO: 2161 - DNA, 53763 bp, Homo sapiens
aaaagaaagaaaaaacagatactacatatcaagatcaatgggttgtagccaaagcagtatttgtggggaaatgagttgctccaagcctatagagtaaggctctcgctacaaaaaggaggtcaggcatgcctcatggaggaacccacacagatggaagcttcctccttaagcccgatttttttcaagaatctgaacctttttgaagtaaatgtctagcaaaaggcgcctgaccacaaagggggccccagtttttctgctgtggtcgttccctgccctggggtctcttaccttctctctgccagttctgggccgtcagcagtatgtggctccgtccttctcttaaggccaatctgtgaataaaaccaacaagaaacaaatgcctttcctcttcctcatagttcagctgggaaaactttacattaaagtaacatccaagtgctcaaaaattaagaaaacacaacaattcttacgccatgaatctctgtagaggcagcaaaccatgtactaggcaccaagtaccctcctctcagaataagaaaagcgcctggcgtctgctgggggcacagtccatgcgtcctcaggcacagctggagggtgcccccttttcctatgccttttttcctagggaacatttcatcaaatgggacaaaagcccattccaatcccaggagcccttggggaaacaccgcccaggcaccaggccggcatcggggaagagagcagccacagctgtcctcggtgcctttttctgcctggtgcctgtctgggtttcacctgggcctcccactgcctcactctgcacaccccttcttcagctccacctgcagcgttccctggaacatccacattgccacgggctgccctggcttctctttccaaattcctggcagggattctggctcgcccaccttagttcaggtgcccaccacctgtctaatctcctggcagggtggcagggaggaaggcgtcctacagtgtttgggggcagcccccctaggctgtgagtgggtcagatgctttaaggaggaaatgaaaggaaacccctggtccacattttccctctcctccaccacacacactgcattgcaactgttctgtctctgaccaccccagcaggctatagtcctccagggcagaggccagattctactcctctctgtttctccagcaccttccacaattcctggcacaaagaagctcaacactaccaagtctctggctgcagctcacaggcagtcttcctgtccagcgctcagccctcagctcaggagcggaccacccacaaattcctttgatcctttacagaaagaaaagcttgtgtgctaaacccaccagggacctcccactcaggccagcagaggagatgcacccactgcagaggtgagtacaggaacctggggctgaggggcttcaagcccatcatggcccagcttctcaacgcccccactagacacccctcacctcttgtcaggggagcgccatcgtgtgcaagtaccttaaacgtgtgttaatattattgttgctatgtatattttaaaaatcacagagcatcaggggggctgatggcattcaaggtctggtcctcagccttgatggatagaaacccaagtttttcattccttagaggcagctcaagacaaagaaatctgactcacatccacaaaacccacagaagactgatacattcaaatgccaagttaggaatggatagtgaacaacacagcgaagaggcctaaacacacacggtcactggtcctacagtctctcgagatctacatggaaaaccaaacttctagaacagcaatgaaaaatacaaagtgtcagagactgaggacaccatcatgaataaaccaggactccgtgccacccggtatacacagaagtcagagaaagataaacggagcaactgcaacatgaggtggcaagggcgccactggggtgaaatgggtcttgaagtgtgagcagaatttctgggcagagaggagggaagggacctccctggcccgggcccatggagaaaggctcggcaccgtcaagggtctggcctactcgggaaacattaggaagtcccccgcatgcacagcacaggctgtgctgtcctgtgtgacgccccatgtgtgcaggcgcacaggcgtgaaggagactgggagaggcagactggagatgccttcacgccagactggagtgcatggacctcctccttgagcaccaagggagggagctggtggggcttgtttaggaaggtaacgcagcaggggaggaggggggctcctgagccctggttactcagctggggatgaaggagggccacacggagagccaaggctctgtggcctctgctgctcctcagccttgccagacacttcacacattcactcacaccctgatgggccaaagatgttagagaactggaaattaaaactcattccctgctctcaatcttcttccccacccttctgtacatgatggaaaataacatttttctcatgacaaaagaaatcagtactttccccagagccaccaaatttcaaaagctcatagcctctcactgaaactttcaaaggaatttatcacacatttaagcctagaagtccacttaggcatatgtagataacaagcctcgtcaaagttactttaggtatctgactagttactgttttgtggcttgattagcgaaagctattaacctgtgctacggtctgagcgttccgccccactccctgattcttgtcttgaatcttaaccccccaggtgatggtttagaagggagggcctttgggaggcgatcagataatgagggctccaccaccttgatcttggaccattcagcctcccaaactgcgaaaagtaagtgtttgctgtttccaagccacccagttcatggtattttgttatagcagctcaaaaccaactaaggcagcctgcaacctagagaaacccatgatgtggaaagcaatactaaaacacagtaaaattctgattcatgtacaatctacctgcaagaacttattctaaagctttattttcttaaacagagagtagaatggtggttgctagaggtggggtcatgggtgggaagttttggtcaaaggggtataaactttcaaatataaaatgcatacgtctggagagctaatgtacagtacagtgaccatagtgagcaataccaaattgtaggcttaaaatctgcttagagggtagatctcaagtgttctcaccataaagaaataaaaaagtaactgaggtgatgaatgtgttaactaatttggttgtggtgatcatttcacaaagtatacatatatcaaatcatgttgtacaccttaaatttatataattttatttgtcaattatacttcgatgaagttggaaaaatataaaataatttaaaaaaatttttaagctttgttttctcatctctgcagaaaactaaaacatctgtgaacaaaacaaaaccacaactgtccccaaactaggaaaagaagagcaagtccctattatcttttaagcattttctacttctacagggcaggagtcatcaaaaacctacaggaaacgttacaactacaaaagcgtcacgggacaattatggtcaaaactgcaagtagcaaagtcacctcttcaaagcaccactgctgtggcctgtaacatgatcccactccacagtgaaggggactccacctagcagtgtaaagggcaatcaactcaaatagaaaaaccttcatgtaccaagagttctgggaggaaagtcttggctgaaacatggacattaccaagctatccaaatgcgtgtgacgtggggcgggtggtgaaagaacacaaggcagactggccagggttttaaagaagacaaagcaagcaggatggaaaaaaagacaatcaaagcattagcgaacgacagtgtggtgggcacagtaatggcctccagggatatctacagcctaatccccagaccctgtaaatacgtcaccttatgtggccaaagggactccgtagatgtgactgagttaaagactccgagctggggagggtgggtccaatgtcatcatgtgtccttgtaaggggggcaggaagatcaaagagagagagccatgtgactacaaagggagaggtcagagagagctcgagttgagggtgctctgtgctgctggtttcgataatagagagaggggtgggtcaccagtgaaggacggggggtggcctctagaagctggcagaggcaaggaaaaggattctcccctggagcctccagaggaacgcagccctgctgacaccttgactttagcgcagtcacaatgacttcagattcccatctccagaaggaagagacatctgtgtcattttaagccactacctttgtggcaatttgttacatcagccacaggggataaggataaacagtgggaggaagggatggatgaacagtcagttcagctttcaggacagcgaagagacaagctgaaaactctgcaacctcccttaagccaaaaccactatgtgtattcaggagccagaaagtctcagaggttcctgccatctttgactgaccagggtagacctgaggtcctcctcctcaccagctgggattatccagcttttcagtaaggctccagggcgatggctgttttcattgatgaaaacatttttccaaataaatcttaattttttcagagtgtgaatctgtcttgtgctcagtactccaaatcctctgttcttcctgacgtttcaagtcccatgtcttctcctccgttcaatcacttcctaacaagcaccaacaacatgtcagccctggggagaaacttcccttcctgtcccttcccttcccaggccgtggcactgcccccacctctgaattcctctccacctctcttacccatgtggcacttagcacacactgctttggattctatttaaacactcaacttgcttatatcttggtttcttggttgtccaaggagagcacaggcctctggagggcaggagatgtatagaaaacgaatttttctgtaactaaaagaaatttttgtttttaggccgagtcttgttctgtcttccaggctggagtgcaatggtgcaatttctgctcactgcaacctccgcctcctgggttcaagcgtttctcctgcctcagcctcccgagtagctgggactacaggtgccctccaccatgcccagctaatttttgtatttttagtagagatggggtttcatcatggtggtcaggctggtcttgaactcctgacctcaagtgatccacccacctcggcctcccaaagtgctgggattacaggcgtgagccactgcacctggcaaaaatgtttaaatatatacaaaagtatgtaaaacctattatgcacagttcaaagaataataaaacagccacttagccaccagcctacttaacaaaaccagtgtcgtggaagtcctgtatgctgttcctctgattacagcccctcctctatcctggaggcagcctctctcctaaattctggggtagtcactccctgactcttttaacaaaacagctgtataccccaagcatgtattctgaaacagtaacagtattgctggccgggcgcggtggctcacgcctgtaatcccagcactttgggaggccgaggcgggcggatcacgaggtcaggagatcgagaccacggtgaaaccccgtctctactaaaaatacaaaaaattagccgggcgcagtggtgggcgcctgtagtcccagctactcgggaggctgaggcaggagaatggcgtgaacccggaaggcggagcttgcagtgagcggagatcgcgccacagcactcccgcctgggcgacagaacgagactccgtctcaaacaaaaaaaaaaacagtattgctaagtttcgcctggttttgaacctcacataaaggaaccacaccacatggaccctttggtgacttgtttctttcactcaacatcattcccgagactcatccatgcccctgcagctatagtccatcctcctcggcagctgcacagtatctcacggttcagatgcactgcagttcacaggtccccctgctgctggttcagatacaccacgattcacaggtccccctgctgctggttcagatacaccacgattcacaggtccccctgctgctggttcagatacaccacgattcacaggtccccctgctgctggtgctaggcacgtgcactgtttctgctggttttgatttacagttaggaacagtgctgcagggagcgcttgtccccatctcctgcacacctgtgcaagagttcgcaaagggatttgcccatggtttaactgctggtccacatgcattccactgccaaatgcttttgcaaagcggcagaacccattcacactcccgccagcagcaggttcgtgccactcctcaatgtcactggctggtagcgtccaaagcttcaccttctgccaacagggtggctgtgaaatggtatctcattatggttttaatttacatttccctggttactagtaaggctgcagtcctttttatatgtatgtgctttctgtgttttgtaatctatgaaatgcccgttcctatcttttgtcctttccttttttttctctcagaattgtaagaattctttaaatattctagatactagctctctgtatgttttgtgtctcattatagtgtctttcatgaactaaatgtgttgttattattattgagacaaggtctggctctattgcccagcctgatgtgcagtggcatgatcacagctcactgcaacctccgccttccgggctcaagccatcctcccacctcagcatctcaagtagctgggacacaggcatgtaccaccaagcccagttaaattttttttgtgtgtgtagagatgaggtttcaccatgttgcccaggctggtctcaaactcgtaagctcaaaccattcacctgccttggcctcccaaagtgctgggattacaggtgggagccactgcacctggctgaatgtcttaattttgaaagagacaaatatatcaatctttctgctttagggtttgttttatttcagaaatccctccttagcctcaggtcatgaagaaattttttcgaattattttctagaaattttacatttttgctttttcagtttaagtctttaatcctcctggcgttttgtgatggtgtgaggctgggatctcacacatctttttttttttttttttttttttgagacagagtctcactctgtcacccaggctggagtgcaatggcgcgatcttagctcactgcaacctcctccttccaagttcaagcaattcttctgcctcagcctcccaagtaactgggactacaggcgtgtgccaccatgcctggctaatttttgtatttttttcttttttagtagagacgggggtttcaccatattggccaggctggtcttgaactcctgaccttgtgatccgcccactttggcctcccaaagcactgggatgtgaccggccggatctcacacatctttaatattcctcctcagcacctgacatgctgctgtagacaactttatttaataaacagaatcaaatactgctttgtgttcaaagctcaaatttcactcttgagaaaaaaacttaagcttttcatactctgcgtcagcactatgacaaagttagcattggtgtatcaagactttttgggatgtctttaccttcactgccaatttttggtataggactaaacgcacaatgaagctgagcctaaagagcagcaacatggaattagaaacctggattctcatccaagatccaacactcttcaccatcatgtctgtatttatgcagtaagaattaaaatattcagagtaccccactcctaggcagatacccaagataattagaaacttttgctcacataaaaactcctgcttgcatgttcacagtggcctactcacaactgccagaaggcagaaacaaacaaaatgtccatcaacaaatgaatgaataagcaaaatgtggtgttatccacacaaaggagtattattcagccataaaaaagcatgaagtactgatacatactacaacatggataaactttgaaaacattatgctaaaggacagaaaccaaatacaaaaggccgtatgttgtatgtttccacttgtatgaaatgtccagcataagcaaatccatagagacagaagataacttagggctgctgagggacagggggagaaaagaggtatgactgttaatggggttggggtttcttttgtaggtgattaaatgttctggaattagttactggtgatggttgcatagcattgtgactatagcaagaactactgagttatacactgtaaaatggctaaaatgataaattttatgtcatgcgtaagtcatttcgatttttgaaaacctactttaaaaaaaagtagcaccaatatgttcaactctgttgccctagaatattccagcagtgattaaaaccacaaacttggccgggtacagtggctcatgtctgtaaccccagaactttgggaggccaaggcgggcagatcacttgaggccaggagttcaaggctaccctgaccaacacagcgaaaccccgtctctactaaaaaaaaaaaaaaaaaaattagctgggtgtggtagaacgtgcctgtaatcccagctactcggaaggctgaggcaggagaatcacttgggcccggggtgcgggatggcgggcagaggtagcaggagctgagatcgcaggcaccattgcactacagcccgggcgacagagcgagattgtctgaatcaatcaatcaatcaacaccctccccctccccctccctctccctctccctccctccctctctctctctctctctctcctgtggcggtcagagtaaaattgagagctcactttatgcaaaagactctgctaagtgctttattcctattgtctcactttattctctcattaatcttataaagcgcagtcagactctcccgtttatagatggggaaattgagtcttatagatgtaaagtcgcacacccaagaccccacaactcagaaaggggctacctgcaattcagatggaggtatagcaaggcgcagagtcctgtccagggagcccactgtgagaccccccgactgcctcgcagtcacctgtacacatcatgttgggatcgccgaggggcgctgcagcgatccggtttctggggctgcgtctgggtggcacgttcagaacggggacctgcctggttcttcttcccagcccttcccctccagcacccggcaaggcccagtcaacacgagcaaactcggaaatcctggctgaacccacgaccgctgcatatttccattttagaaaaacacggcaacaacaactcaaaccaaatcgttcagaaatgagaataaagaagcaccgacaaaggaggcgattgctggggccgctcgggggaggagccgggtgagaggctgcagggagggcagggcatgcgccggcgacaacggggttcgcggtttggggggcaaggcccgggggaagagagagaacaggggtgcagcgccgcggcggggggcgtgaggatggagccgggggaaggggggctctgagatgtgaaggggcggggctggggctttttggtctgaaggaaggagtctcacgggacggagggacgaagatttcctggggtcaggggcgccaaggggcttcggggccggatgcagcggagggggcccggggcctggggggcgtggtgagagctcagaggggtctcgccaagcagccggctggcgctgaggggaccgaggaggggtctggggcgaaaggaccgcgagagggcgcccagggcgcggggggcgcggtacctgcaggccggcaaagtcttccaaaccggtcccgccagacccgcgcggccgccgcccccgtctcggccgccggagctgctgccgcgccgcgccctcacgtgacccgcgtacgcgccgggggcggagccgtctcagacccgcccccaccccccggcgtccccagcgcgccggtccgtcccgagtgcgcgtgcgcagcggttgcctgggcgaccggggaagcgttgggctgtaaagactagggcgccagcggctggcgaagaaggaaagagggtactctctggctgggctggggccgtagcgacgtccgccgcgaacctgggccccccaaagctgcggggcgttcggtgtcgccgaagtaaacatgcaccctgagccctcggagcctgcgacaggtggtgcagcagagctggattgcgcgcaggagcccggcgtggaggagtctgcgggtgaccacgggagcgcaggccgagggggctgcaaggaaggtgccgactgccccccagggagggcggtgggcgaggggcagacacggctaggcgctccagcccccttcccacaccacatacccgatcttcacagccaaataataacaataataataatggtagcaagcaacgctctgcagtaggggcttctctcgccatttcgtactgaggaggaaacatacttaagaggttacaaaacttgcaccaaacagataaccctcggctagtcagtgacagaagagacttggccgggtgcggtggctcaacgcctgtaattccagcactttgggaggccgaggcgggcggatcatcaggtcagtcaggagttcgagaccagcctggccaacatagtgaaaccctgtctctactaaaaatacaaaaaatgagctgggcgtggtggcgggcgcctgtagtctcagctacttgggaggctgaggcaggagaatcgcttgaacccgggaggcggaggttgcagtgagccaagatctcgccattgcattccagcccggacgacagtgggagactccgtctcaaacaaacaaacaaacaaacaagcaaacaaaacccaccagactcaggcccagacagtctgggtctccagagccccagccctaacccaccacgctattctccctggtcccaactttgatgctttaaatgtgtccctttattgctatcactatgtaagatcaaaggctttctctccctccagactgcatgttgtgtcagggcaagacatcttgattgaatttggagtctagtccagtgcctgacctagggtagagagtccgaatgaagacttggttctggggtcagtgtgtgatcccctcaccaaagtttgccagaatggacttgaaagataaccttcatggccaggcacggtggctcacgcctgtaatcccagcaatttgggaggcagaggcaggtgggtcacctgaagtcaggagttcgagaccagtctggccaacatattgaaaccctgtctttgctaaaaacacaaaaattagcagggcgtggtgacgtgctcctgtaattccacttacttgggaggctaaggcaggagaattccctgaaccccggaggcagaggttgcagtgagccaagggggaggctgaggctgcagtgagccaagatcacaccactgcaccccagcctgggcaatggagcaagactccgtctcaaaaaaaaaaaaggaaagaaggaagcctggcttcagcttctgctcccactagacttggtgccctaaaggaaaccttttagtgattacattaaaaaaccacttgatttgtgttccagtttctgaacgcaggcaacaaataaaccagctgatttgtgttccaggcaacaaatatatcttaagcatcaactgtccagatgaaccttgtatgaggagccatagggaactggcattactcagtggaaagacactggtcttggagccattgacactgggttcaagttgaggctcagcagctggccagctttatggctgttggcccagagcttaacctctcggagccttagtctcctcatctgtaagctggaataattatacaggagtataaggagagaattataattaaatgtcccagcatatagtgggccattattaaatggtagctcttgttattaattacatattaatatttatatattgagcgcttattctttattttttccacaaacatttatctgttgcttcctgtggctgggcattctatgcaaaattgatgagtttaagaaccagtccccacacgcacagcctttagtcttgttcaatagaccacacaaacacagaaagcagcagacaacagctcttaaagttaagtgcggttgaattggccaattttgaatgacctttaaaaaaattatttatttgaatgtgctcatgttattgttatcatagatattctcactatttttgtttcttttcatgtgattttcctttttatgattttttttttaagagatggaatctcactatgttacccaggctagatcttcctgcctcagcctcctgagtagctgggactacaggcatgctccactacacctggcttgagaaattttttaaaagacaaaagaacaaagaacattaaaacaaatacccgtgttttgccagcaagaattgaaaatgagtaacattttatcatatttatttgaagtcttttttaattaaagaaataagcccccccaaaaaaaaaaataaaaataaataagggtgggcacggtggctcacgcctgtaatcccagcactttggaaggccaaggcgggtgggtcacctgaggtcaggagtttgaggacagcctggccaacatggggaaaccccgtctctactaaaaatacaaaaaaattagctaggcatggtgacaggcgctggtaatcctagctacttgggaggctgaggcatgagaatcgcttgaacccgggaggcggaggttgcagtgagctgagatcccgccactgcactccaacctgggggatagaccaagacggtctccaaaaaaaaaaagaaataaaacatttcacatagagttggtgttccttttctcccctgtaccccaccccgtttctaatcccattcctttcctcccttgtccagaattttatatgaattcttgcaagcacttctctatacatgtatgccctgaaacagtgtatagtattgctttgcatatttttaatttatatatggtatcctgtgcttattttgaaacttgcttttttcactccatatacgtttctgagaattatccctatggatagatgtagttctagtgcattcttctcaaaggtagaaaagcaagtcattgttttatgtaaccagcccctatggatggacatttacgttgttaacagtttttggcttttataaaaaaaaacgcagaaacaaatctctttgtccatgttttcttgtgcacctgtacaagagtttttatagaggatctacctagaagtgaaatttacatagtctttgccaatgctttaaaaattgttacacatttaaagattactgttctctctctctctcttttttttttttttttttttttttttttttttttttggtgagacggggtctcactttgttgccaggctggagtacagtggtgtgaacacagctcactgcagccttgacttcccaagctcgagtgatcaacctgcctcagccccacaagtagctgggaatacaggcacgcaccactacatctggctaatttttgtagagatggggttttgtcatgttgctcaggctggtctcaaacacctgggctcgagcaatctacctgcctcagcctcccaaagagctgggattacaggcctgagccaccatacccagccactaaagaatactggtgttctatactaaaagtggatggtcattaaccaagctgaagttgggggtattttttggcatatatcttgatctctacagacctgatctcttttattttacagaaattaatgatcctaaggaaatatgtgtgggttcttctgacacatcctaccacagccagcagaaacagagtggtgataatgggtcaggtggtcacttcgcacacccaagagaagacagggaagatcggggccccaggtatgtgggcatactcctaattagtgcacatttatggagtaaggtagatggcgtaatcacccccttgtacggataatgaaatagaggctggtagagattgaattgcctgcccaatgtctgagaatggagtgaggatggcactgcctctgccgcacagctgagcgcacattctattaaactttaatgccagactgcagagaggaacagcagtagttcctcatgacaccatttaaagtatttttattagaacatacaatgcaatttttaggccgggcgcagtggctcatgcctgtaatcccagcactttgggaggctgaggtgggcgaatcacaaggtcaggagttcgagaccagcctgcacaatatggtgaaaccccatctctactaaaaatacaaaaaattagctgggcgtagtggcgggcacctgtaatcccagctacttgggaggctgaggcaggaggatcgcttgaacccgggaggcgaaggttgcagtgagccgagatcataccactgcactccagcccgggcggcagagtgagactccatctcaaaaaaaaaaaaaaaaaacatacattgcaatttttaagaatgctgaaaataagccaagcgtggtggcccttgcctgtaatcccagtactttgggaggccaaggtgggtggatcacctgacgtcaggagttcaagaccagcctgaccaacatggtgaaaccccccctctactaaaaatacaaaaattagccaggtgtggtggcgcatgcctgtaatcccagctactcgggaggctgaggcaggagaatcgcttgaacctgggaggcagagtttgcagtgagctgagattgtgccattgcactccagcctgggcaatagagtgagactctgtctcaaaaaaaaaaatgctgaaaataatattcgatgaggccctaaaatctgtacaaaaaagaagaagaaaaaggaaaggagaaagagaaaaagacgaacttaaaataggtatcagggatataggatgttatagaattttgggcaggaatggatgtggtaaagaactgtgagaatatgttttacagctgacaatttgcaataagcttattcatatttttccattttaacagaatgactaaaagttccctgcaaaaactctgcaagcagcacaagctttatattaccccagcattgaatgatacgctgtatttacactttaaaggtaaggacctaagagaggaagtgcttcacgtcaggtggaaagattctgtctagcggtataaaaaattacttgcagggatcacctttagttctcagaatgtatctaagcaggaaatttcaaagtttagtggagatttatggaaaaggaataacatttatttcaagaaaaagtcttgcctgaccagtttacaaaggagccactggctataggaataccaaggaaacacattatctttcatttttgtttcctaaggaatttttttttcttttctttctttttttttttttttttgagatggtgtcttgctctgttgcccaagctgaagtgcagtggtgcaatctctgctcactgcaacctctgtctccaggttcaagcaattctcctacctcagcctcctgagtagctgggttacaggtgcccaccaccacgccttgctaatttttgtatttttagtaaaggcggggtttcgccatgttggccattctggtctcaaactcctgaacccagtcgatccagctgcctcagcctcccaaagtactgggcttacaagtgtgagccactgcacccagccaggactttaatttttcataccagaaagttagtttgtaagtactttggggttgggaggtatatgttgggaaggattgcagcttgatgttggaaacaaatgatgaggatctttggatgcctcttagaatggagaggcgtgagcaggagccagggttggaggccagtatcacatatcaatggaagctcaggttcacagacagggcttttcccagcctgagggcttccagtctgtgctgatggggtgaccagcttgctcatcagtcctctcattgttcatttgtttcttcagtagctgcttgctgagagtctactgtgtgcccagcactgctcagtgctgaaaatgcacagagggaaccggcaaaggtgcctttggtgtcctgggggatgggagcagctattatgaggacggtgccacgccagggagacgcccaaagggatccaggagcacaaatgccttaaggggttggaacgactcctatgggtctcctcacctccacttttgcccactccaaaattctctacccagcatctaagcatagcagtgagtaagatgatgtaggaggacagactgccgggggactgatacttaagaggtgggaagaagaaaggaaccagtaagtttgactgagtagagacagtcagagaggtagaagagctgggagagagaggtgcccatattagttatctattgctacataattaactgccctgaaacttagcaacttcaactcatgatctcacccagtttctgagggccgggaactcgggagtcatcagctgggcggttctggctcagggtctctcatgaggcagtagccagactgtcagcgcagtctcactcattcgatggcttgacgagggctagagaatccacttccaggctctaggcctcagaccctcatagctgtcagccagaggccttaatttctcaccacatgagcctccccatggcagctggcttccctcagagcaagttacccaagaaaggaagcaaggccaagacaaaagtggaggtgacacttcatcactccattgtatgctgttggtgtctggatccactcctgtcttactgcatcgctaacatgaaggcattgactaggagggtgatccagagagcctgaggaggaagctgggaaaggggcgcagggcctgtgggccagatgccttggaatggtcaagggctaagaggactgaccgtagcgtgtagcagttaggatcttagggagactttagccaggtggttgcagtgatggtgggatccaggggagagcaacaagttggagatggcttgaacagcaaagggggaggagatggggtaagagctagagcaaagaccagggagaaaaaccagaatgtcagaaacccaaggggacaaataatccagtttcttcaacaaaaaattacaatgtaagaaagagagagagacatacacacactcttaggttaaaagtgacttaaggccaggcgtggtggctcacgcctgtgatcccagcaatgtgggaggccaaggcaggcagatcaggagtttgagaccagtctggccaacatggtgaaaccccatctctactaaaaataacacacacaaaaattggccaggtgtgatggtgcatgcctgtaatcctagttacttgtgaggctgaggcaggagaatcgcttgaacccaggaggctgtttgcagtgagccaagattgtgctaccgcgctccagcctaggcgacagagcaagattctgtctcaaaaaaaaaaaaaaaaaaaaagttggctgggcgcggtggctcacacctgtaatcccagcactttgggaggccaaggcaggtggatcacctgaggtaaggagttcgagaccaacctggccaacatggtaaaaccccatctctactaaaaatacaaaaattagccaggtgtggtgatggcgggtacctgtaatctcagctactcaggaggctgagacaggagaatcacttgaacccaggaggtgtaggttacagtgagccgagattgtgcaattgcactccagcctgggcaacagagccagactccatctgaaaaaaaaaaaaaagtgacttaagagacatccactaattacaaggtttggaccttatttgtatgttgattcagacagtaaacagtttggaaacaaagacaacaaagaaatgtgaccagttactggctgtttgatgatgacgttgaggaactgttgtttagacgtcacagtggtgttgtggctatcttaaagaaaaaaaaaatcctatcttttatagatactgacttcagcatgaagaccttggagcaatatggcaaatacttccactataaaaatttttgtggagagggtttgcaaggagggagagcatcaggaggaacagctaatgatgctaggcttaatacctaggtgatgggatgacctatgcagcaaaccacatggcacacatttacctatgccacaaaccagcacatccagcacaggaacccatcaacttaaaataaaacttgaagaaataaaataaccaaaatttttgtggaaaaaatataggattttaaaaagtctatctatacaatgcctgtgtttaagtgtattctataactatgttaaatattacttgtgcttatagcaagcttggaaggcgagagagaaaaatgaaaacggattatctgttggcaggaacatgggtgcatttctttttattttgctcaccattgatattagaattttttaataaaaactttttcaggcaacaaaataaagaactttaaaaagtgttggtaatagtaggtcaaggcatgaattacacattgatgacgagttactaaaggaaactaaaagatttgttttcctaaccgtaaatttggctcataaaactgaaaaagagaacaaaacaaggcccacagtttgcactagggtcaggcctggtgggaacattttcaaggcagggttacccccactgcacccccacctccacccactccccaccatgaaggcagcagtaggctccaccctcccaggtgggtaattccagcagaaagactaccagtcttttcagcaagaccccctaggattcatcaaagttcgccttgcttggctaagtgtggccacccccgaatgagtcaccgtgactctgataggctgccagagagccgttgggtgatattaggaaaaggatggttcctccaagaaaagttgctactggaggaaggaggtgtggatgccaggtaggcaggtgtcttagtccgttttgagctgctgtaacaagaaaccgtagcctgggtggcttgtacacaacaaaaatgtatttctcacagttctggaggctaggaagtccaaggtcaagctactggcagatttggtgactggtgagagcttgcttttttattcgcagatggcactttcttgctgtatcctcatggggtgaagatggcaaagaagctctctggggcctcatttatgagaccactaatcccattcctgagggttcttctctcatgaccttatcacctcccaaaagtcccacctcctaataccatcacattaggggttaggatttcaatgtatgaattttgaagggacacagacattcagttcctaatagtaggcaaaaacaagggtgaccgtgacccctctgccctgggagtaggagcttaattcccacgtgcttcctttttgttaggttttgatcgcattgagaacctggaagagtacacagggctgcgctgtctctggctgcagagcaatggaatacagaaaatcgaaaacctggaggcccaaactgagttgcgttgcctcttcttgcaaatgaacttgctccgtaaaattgagaacctggaacctctgcagaaactggatgctcttaacctcagcaacaattacatcaagaccattgaaaacctctgtaagggtacccagcaagcagtgtgtctgtttgccatatgtccatcaccttcccctgagggatgttctaagcttttatattatgggcaagaagtggtgtttttttttgtcttttttttgtttttttttgagacagagtcttgctctgtcgcccaggctggagtgcagtggcgcgatctcagctcactgcaagctctgcctcccgggttcatgccattctcctgccttagcctccaaaatagctgggactacaggcacccaccaccacacctggctaattttttgtatttttagtagagacggggtttcaccgtgttagccaggatggtctcgatctcctgacctcgtgatccgcccgccttggcctcccaaagtgctgggattacaggcgtgagccaccatgcccagccaagaagtgtttttggttttgttttgctttgcttctttttgagatggggtcttgctctgtcacccaggctgaaatgcagtggtgcagttagagctcactgcagccttgacctcctggtctcaagcgatcctcccacgtcagcctcccaggtggctgagaccacaggcatgtgccaccagacctggcaagtttttctactttttgtggatatggggtctcactgtgttgcccaggctggtctcaaacctcctgggctcgaaagattctcccgctttagccttccaaagtgctgggattacaggtatgaaccactgtgcctggcccaagaagcatttttatgcctttgtttttgacttctgctgaccttaccttccagcctgcctcccagtcctgaacacattgcagatggcccacaatcacctggagaccgtggaggacattcagcatctacaagagtgtttgaggctttgtgtccttgacctttcgcacaacaagctgagtgacccggagatcctgagcattctggaaagcatgcccgatttggtaaaaaacaaaaacaaaaacaacgaaaaagcaccacaggaaaccgcttctattattttcatcaaatatcaagtccttttgtcttttctctccttcctgccttccttccctttttcacacttttttcctctttgtgtttttagctggagtatctgaaatgccagttatcgtattattttacccacaaatagttcagtgtgtgcctctaacagataaggactttttttttttgatatagagtttcgctcttcttgatcaggctagagtgctgtggcatgaactccgcccactgcaacctctgcctctgggttcaaggaattctcctgcctcagcatcccgagtagctgggatttcaggtgcctgccatcacacccagctaatttttgtattcttagtagattcagggtttcatcatgttgtccaggctggtcttgaactcctgaccttgagtgatccacccgcctcaacctcccaaagtgctgggattacaggcaagagccattgtgcccaaccaccactcaattaatttttcaaggaaaccaggtcctctgtctggtgttacccacattctggatttagctgattgcatccttgtggtgccacttaacatgttctgctggccctggtatttcctgtaaaatgatatcggagccagaggctggatggtatccaggctccatatttcaccttgaggtgtgtcaggtccttccactgccagctcctcacatccgggagcgtgtgatgcctgcttgcttctccttttgttgttttaagattcactagtgggttcagatattgtcagcctggtctagccattatgaagttccccgtcagtccttctcccagttattttagcagtcactgatgaacattgcctagattaattatttaatgatgagtcacacaatgacaactttccagttttctcactctctcagcatctgttagctagaatgcttctacacttctacaaagagctttcattcgccaactagtggttcatgcagttcatgcagaaaaggccaggatcaatgtttgacccttttatttatcatttttcttttcttttcttttctttcctttccttttctttctttctttctttttttttttttttttttgagacagggtcttgctctgtcacccaggctggagtgcagtggtataatcatggctcactgcagcctcaacctcctgggctcaagcgatcctcccaccttagcctcacaagtagctgggagcacaggtgtgcaccaccacgtccagctaatttttatattttttgtagagatgggttttgccatattgctcaggctggttatttatcaattttcagtaaaatgaattgaaacctggcaacctctcatggtgacagtgaaacctttctttttttcagtatcattatgaacgcatacatttatatatacagtatttgacatgatttaactctcgctatcactttaatttttcatgttcaaattttcccatccaggtgaggtatggtggcccacacctgtaatcccagcactttgggaggcccaggtgggcaggtcacttgaggccaggagtttgagaccagcctggtcaacatggcaaaaccccatctctactaacaatacaaaaattagctgggcatggtggtgcacgtctgtgatctcagctacttgggaggctgaggcatgagaattgcttgaacccaggaggcattgcagtgagccgagatctcaccactgcactccagacagaatgagacactgtgtcaaaaaaaaaaaaaaaaaaaaattcccgtcctttgggcttgagaacccgtcaggttgcttcctatgtccttttgagtcctcgctagtagcctttgacagcctccttgcttcttagtgtctatgtgttgtcgtgtgtactaggaaaaaaatactaaaactagcacacaaaaaccttgagtttattgtataccgcttaggctattgataaacatggagaaaagtgagtcaactgaaagcaaatcatagttcaggaacaatctgtagtgtgtactatcaaaagactagtttagaactgcagcacacggtgagaatagaaagctctattatattataatccccccgtttgttcgtttttgttttggctggggttgccataagtaccgggtggcttaaccaatacaaatttattttctcgtggccaggcacagtggctcacgcctgtaatcccagcgctctgggaggccaaggtgggcagatcacgaggtcgggagatcgagaccttcctggctaacatggtgaaaccgtctctactaaaaatacaaaaaattagccgggcgtggtggcatgcacctgtagtcccagctactctggtggctgaggcaggagaatggcgcgaacctgggaggcagagcttgcagcgacccgagatcgcgccactacactccagcctgggagacaggcagagtctggctctgtctccaaaaaaaaacaaaaacaaaaaagaaacttattttctcatgattctggagactgaaagtcaagagcaaggtgtgggcagggctgggttctcctgaggcatctccttggctggtagatggccgtcttctccctgggtcctcacatggtccctccctctgtgccgtgtgttctctgtgtcctacttttttcttctaaggacaccagtcagattggattacggcccaccctaatgggctcatttcaacttcatcgtggttttaaaagtcttatctccaaatacagtcacattctgaggtgctgagggtttggactttaacatgtgaattttgattaggacacaattcagcccagaacgaaagcaggttgctttatgttaatagttgtttcgtgactgcttttaaatcctcccaacaccgtttacccctttattgctgcctgggtgtattgctcccaccaccccaccctgtgcagggtaaccacattttgaaatggttcaccctcatgttgccttaagcattcaacttctttttttattttctgagatggagtctcgcttagtcacccaggctggagtgcagtggcataatctcagctcactacagcctccccctcctgggttcaagtgatttttctgcctcaggccccatgaatagctgggattacaggtgctcaccatgacgcccagctaatttttgtatttttagtagagatggggtttcaccatgttggccaggctggtctcgaactcctgacctcaagtgatccacccacctcagcctcccaaagtgctgagattacaggagtgagccaccatgcccagccccactaagcattaaacttctttgagtttcttaaggcagtagaggaagagacagtatttaaagatgggggaggatggcaggtcggattgccgagccccttcctcctccctggtcctaagtgacagcggggagagctgtaagccgaggaagaagggccgtccatcctgcggcactcagcagaggtaagcgggcactccccatcctttcccttagtcactgctgcttctctgtctagcggctgtgtgcgttttggtaaaatggatcctggctgggaagaaaagaaaacaatcaattaggcagagattcatttcagtaaaagaggttgggtagcaaaactaatataatcaactgcactcagaaaaagcctcaggaaatgttttccagtattgttctggagggacgatgagatctaagatctgaagttcatgtggaagaaagggctgctgaatgatctagacagctctgatagcgtgagagcaatggaaaccttccgatttctcccatcaagtcaccaggacaggatattggcacttctattttgctcaaaaaatagattttgttcatttattcttagtgcacagcacatataaaataattcaatcgcatctttcagtaatcattttggttctgcttgtcttcttgcagcgtgtactgaatttgatgggaaacccggttatcagacagattcctaattacagaaggacagtcactgtacgactaaagcacttaacatacctggatgatagaccagtgtttccaaaggacaggtaagaagagaaaagccttctgatcacattttaatatttagtagttgaccatgcttaatattaaactttttaaatttctgattcttgagaaatttcacatatcaaaaatgttctttggaaataggcttgatggctacataattgactataatgggaatttgagcacttattcatagatttttttatattcctttgataaatatctttgtatcagtcgtttacctctttgctgatgagttccttggaatggaatttttggagtagtatcactgcattgaagaaagtggtttcagactttgtaaaaacccttacaaatattttctagttgttttctagagagtttgtaccaatttacaacctcacataacataaccatgaaaggaaatctttgccaagtttgttgatgggtgaagatcgtaccccattgttttaaattgccatttttggataattgatgaagttgggcattttcttcattgttattggacacttatagttcctcctttatgaatattctgtcagtgactttttccaagtttctttttgaagtgcttttcttaccgatttgtaagggcttctttaatatcaggaacatcgtaccctggactgccatgtttatcatcactgcttttatctgtgtttttaacttacttttaaatttagatcaatttagtaattctaattagaataaaatatcagtcatataggctacttgacgagatgtataatccgaattttgcattatacaacatttaaaataaatgtagcttgtaatgtgtttttaaactcacaaatttaaatcaaactaacaaatatttcaaatagagcttccactttagccaggtaagaaaaccagggccgggcgtggtggctcatgtctgtaatcccagcactttgggaggccaaggcgggcggatcacgaggtcaggagatcgagaccaccctggctaacacggtgaaaccgcgtcgctactaaaagtacacaaaaattagccgggcgtggtggtgggcgcctgtagtcccagctactcgagtggaggctgaggaggagaatggcataaacccgggaggcagagcttgcagtgagctgagatcgcgccactgcactccagcctgggcaacagagcgagactccgtctcaaaaaaaaaaaaaaaaagaaaaccagaaggcctgctcctgggaggttcaacagaaattgacgcagctccctgggccccaggtctgggggtggtaaggacggggagagcagccagtgtgcaggggtctgactcccaagccagctctgcagccacgagctacgttacacccttgggggagctccctcacctccctgggcgcacgttcctcatctgcagcgtggggatgagaatactgttgccacagggtccctgtgagcgcctgtgagcaacatgcaggactccgagcaggtgctgggctcctaggagtgaaccagtaggagcagctgccactgaagatcctgctcccgccccaggggccatgctgaggaaagtaacatggatgttagcaataggagccaccgccctttagagcatagcccaagactccagctcaggagtcagattaacctggcttgagtctctttttagagacggggttgcactctgtcacccaggcaggagtgcagtggtgcaatcactgcagcttcaaactctgggttcacacaagcctcccaagtaactgagattacaggcgtgcaccaccaaacccagctaatttttaagttttttgtagagatgggggtctcactatgttgtcaaggccagtctcaaatttctggcctcaagtgatcctcctgcgttggcctcccaaagctctgaggctccgaaagcctcacaggcatgagccaccacacccctggcattgaatcttaatccagccactgactaattgtttgacactgggcacttgctgtcatctaggatgcagcaggtatctgctcatctgtcgttttattagagcactctccatgacctatctaaatagtaccttctccacttgatgtctcttcggcctgatttgatttccttttaggacacatgagtctctgacatatactcatttctttgtttagggtctgtcttccccgactaaaagggctcctctaacagagatcagctcttacattcactgctgggtccccagcctctagaatggtgactggcatgtagcaggcaacagataggcctttgctggctgtctgctctgagatcaaagggtctgaggatttcttactgtgtggtaaatggactggaacatggtttattctccttggcatattctgtctcagtgactcgtggtctttctctgctatagtatactttgcaacaccctgtctgactatttccaaacacctgtacctttgattttacagcagggatctgcttcttctctcttaaggtaagcctcctgtttttaaaccaccagactttgtttttcaaataacaactttgttgaggcataattcacataccatacagtttacgtatttaaagtgtacaatgtggctggatgtggtggctcacggctgtaatcccagcactttgggaggctgaggtgggtggatcacttgaggtcaggagactccctctcaaaaaaaaataaataaataaaaataaaaaacaaagtgtacaatgcaatggctttgagtatattcacagagttgtgcaaccatcaccacaatcaattttagaacattctcatcaccctaaaaaggaaatactggatgggcatggtggctcacacctataatcccagcactttgggaggcgggggcgggcagatcaccaggtcaagagattgagaccatcctggccaacacggtgaaacctcatctctactaaaaatacaaaaattagctgggtgtggtggcgggcgcctgtagtcccagctacttgggaggctgaggcaagagaatcgcttgaacccgggaggcggaggttgtagtgagccaagatcacgccactgcactccagcctgggtgacagtgggagactgtctcaaaaaaacaaaaaaaaaagaaataccatccccattagcagccaaccccctatttctcgctccctgaaggccctggcagccactcctctgctttccctctctgttgatttgctcgttctggacatttcatataaatggagtcactcaccatgtggccctgtgtttctttcactcagcatcctgttgtcaaggttcatctgcgatgcagcgtgttccatccagtacttcattcctttttattgccaaatgatactgcattttgatacactacattgtatttgtccatcaactttcagaaattagggttgttttcactttttgcctgttgtgaataatgaagtttttgtgtggacagctgttgtcttctcctgggtatgtatctaggagtgaaatttctgggtcatacagggactttacatttaatttttgaggagacaccacatggttttccaaagcagctgcaccattttacatccccatcagcagtgtaggaaggttccaattttcccgtatcctcaccaacacttcgggttgcctgtcttttttttcctctctctctctctttttctttttttttttttttaagatggagtcttgccctgtcgcccaggcaggagtgcagtggtgagatctgagctcactgcaacctctgtctcccaggttcaagcaattctcctgcctcagcctccctagtagctgggattacaggcatctgccaccacacccagctaatttttctatttttagtagagacagggtttcaccatgttggccaggatggtctcaatctcttgacctcatgatccacccacctcggcctcccaaagtgctaggattacaggtgtgagccaccgcacccagccctgtctttttatttctagtcctctggatggtatgcagtggtgtctcattgtggtttccatctgcttttccctggtagataatgatgttgagcacgtttcatgtacttattggcagtttttatatcttctttggataaatgcctgttcagtttctttgctgatttttaaaaaattaatagacttttttttttttttgtgggggacagcgttttgctctgtcaccaagcaaccctcccacctctcagcctcctgagtagctgggactgcaggtgtgcaccaccatgcctggctagtttttgtgctttttgtagagacggggtcttgccatgttgcccaggctggtctggaactcctgggctcaagccatctgcccatcttggcctcccagagtgctgagattacaggcatgagccactgcatctggcctagactttattttcagagcagttttagatttactgaaaaattgagcagaaagtagagagagtttccatataccacccgccctcactgtttcccctatttgtaacgtcttacattcgtgtggtacgtttgtgacaagcgatcaagcaatgctggtaccttattattgactgaagtccatcatttctttagggctcacacttggtgttgcacactgtatgggttcggacaaaggtatcatgtcctgtatcccccatcacagtatctcacagaatagttttactgccctaaaaccctctgtgctctgcttcttcatccctcctacctcctcagccccaacttctggcaacactgatctttttgctgtctccatggttttgccttatctagaaagtcatatagctggaatcctacagcatatagcctttatggactggcttctttcacttagcaaggaagttaggcttcttccatgactttgtgtggcttgacagcttgtttcttttcattgctgagtgatattcctccgtctgggtgtgccagagtttgtttatccattcacctactaaaagacatcttggtcacttctagtttttgccaattagaataaaactgctgtaaacgtccatgtgcaggtttgcgtgtggacataagtcttcaactcatttgagtaaatactcaggagcacaattgctggatcatatggtgagagtatttttagtcctgtaagaatccgccacaccattttccaaagtggctgtaccatttcgcattcccacctagaacaagtgagcgttgccgggactccacatcctcattagcgcagcgttgccgtgttttggattttagccatcttgtagccatatcatgttatcttattgttctaatttgcatttccctgaggacacgtgatgtggagcatcttttcacaggcttatttgccatctctatatcttttttggtgaggtaccctgatcatttgcccagttttttattgggttgtttccttatctttgaatttcaaaagttctttgtatgttttggatccaagccctttcccagttatctttttttgcaaatattttctcccagtctgtagcctgccttttcatttttttaaaactttgctcattttgaaattgtgtcatctttttattaatgagttgtgaggcttatttatattttccaggtacaagacccttatcaaatatatgatttgcaagtatcttctcacattctttgagttgtctttttactttttttcagtagagacagggttttgctatgttgcccaggctgatctcgaactcctgggctcaagtggtcctcccactttggcctccaaagtgctaggattacaggcatgagccactgtgccctgctggttttttaaaataatactttatttatggtatactttgcatgacaaaaatttttaattttgatggagtccgatttctctattttttctcttgtcacttgtgcttttggtgccacatctaagaaggctttgcagactgttccaccttaaataataaaatttacatgtggaacttttatccttgcagtcacatgtctgatgctcactttgctttgattttgaagaaaatgagcaagttgatcagacagtgtatgtttggagttcacctcccctatttatgtttctttgttttttaaacagagcttgtgcggaggcctgggctaggggagggtacgcagctgaaaaggaggagagacagcagtgggagagcagggagcggaagaagatcacagacagcattgaagccttggccatgatcaagcagcgggcagaggagaggaaaagacagagagagagtcaagagagaggtatgcgctcggccgaagacaacagccccagagttcctttgagattaggcaagtctaagctctcaaacccagtctttaatcttgggaatttttttttttttttttttttttttagacagagtcttgctctgtcactgaggttgcaaagttggagtgcagcagtgtgatcttggctcactgcaacttctgtctcccgggttcaagcaattctcgtgcctcagcctccccagagctgggattatgggcacgtaccaccatgcctggctagtttttgtatttttagtagagatgggatttcgccatgttgtccaggctcgtctcgaactcctggcttcaagtgatctgcctgccttggcttcccaaagtgctgggattacaggcgtgagccactgtgcccagccttggattttctttttttcttttttttttttttttttttggttgggacaggatcttactctgttgcccaggctagagtgcagtggcacaatcttggctcactgcaacctctgcctcaagtgatcctctcacctcagcttcctaagtggctgggactacaggtgtgcaccaccatgcttagctaattaaaaaaaagaatttctgtagagatggggtcttactatgttgcccacgctggtctcaaactcctgggctcaagtgctccacccaccttggcttcccaaagtgctgggattataggcatgagctgctgcacctggccagggatttttttaaaaccatttcctcacaacctgcagatccatctgcagttggcctcacctacctgccagcaccagtgagaacctcaaacagtgatgagctgtttcaaaccacttttactgattggaacagtttttcaaaataaatgatgtattagttttctgcggctgctgaaagtaggaaaactcaaataggttgttttcttctcccacactctcaacactcagcacacttgtggtcacgcaatgtgcagggtgtccccacacccaccaattctctgacaccagccggctgtcctgcaattcatttccatcctgacactaaccgcacaagtgatgggcaatggtctcgcaagatgactctccacttccaatgccaaccgcgagtctcagggtgtcgcctgtacttctaacagaatggctataaaattagggttcccatgaccctctctttgggtttgataatttgctatgatggctcacagaactccagagaacacttatattttctgggttattatattaataaaggataaaataagggatgcagatgaacagcaagatgaagtggagcttagggaagggtctgtgggaaggggcggagcttcataccctctctggccacaccccgctccaggtaactccagtgttcagcaacttggaagctctctgaaccccacagtttagggggttttccagaagctccagcacgtgggcatgatggatgattagctccatttccagcccctctgccctctctgaagccccagctgaaagctccaagcctcttatcatggcttggtctctgtgctccagaagccaccccacccccaagagccgccccattcgaacaaaagatgtgcctgtcactctggatgcaggtcttaggagctctgtgtcaggaaactggggttgaagaccaaatattagaacaaaagagcctcctagcacccctatgtacaggggttttaggagctctgtttcagagatctatgtatcttgtaatttcacagctgccacaacaaattaccacaaaattagtggcttaaaagaatacaaatctggccgggtgtggtggctcatgcctgtaatcccagcactttgggaggctgaggcgggtggatcacctgaggtaaggagttggagaccagcctgaacaacatggagaaaccccgtctctactaaaaatagaaaaaattagctgggcgtggtggcacaagcctataatcccagctacttgggaggctgaggcaggagaattgcttgaacctgggaggcagaggttgcagcgagccgagatcgcaccatcgcactccagcctgggcgacaagagcgaaactccatctcaaaaaaaaaaaaaacccacaaatctgttttaccctattgcagttctgtgggtcagaagcccaaaatgggtttcactgagctaaaatcgaggtgtctcagggttgtgtaccttctgggggccccaggggagaacccgcttccttgcctttctcacctcctagaggccgcctgcgttccctggctcgtggccccttcttccaacttccatgccagcagtgtggcatcttccagcctcattctgactctgacgctcctgcctccctattctgagggctcttgtgattcttttgaacctgcctggataacccaggacaatttcctgatctcagggttctagatcctaatcacatctgcacagttcctttgtccgtgtaaggtaacgtattcatattctgacattaaggtgtgaacacctttgactaatatttttatttttattttttagagacagggccttgctatgttggccaagctggtctcgaactcctggcctcaagcagtcctcccgcctcggcctcccaaagtgctgggattacagacgtgagccactgcacctggccacacatacatttttatataaaaatggcagaaatatgttgcttcctgtctagtcttttgaattagcatactataactattttccatacaatagacattttcttactgcatatattgtcttttcctaactttttgttttgaaatgttaaaaattttcagaaaagctgaaagaatagtaaaacggatagctgtatgtctgcatttattaatagattctgtggtttttcataatttgctacacatttgccacatacacacacacacacacacacacacacacactttgcttttcccctgaaccatttgaagataaaggcaaacgtcacagcccttaaacccccagtgcttcagcgtgcatctcctaagaactgcctgcattctattttcttgatagctgtgacctgttccattaaagggctgtgcttggcagtgccttccgtaggcatttggctcccattattatccattataaacaacactaatgaacatccctcaaggatacttttttttttttttttttttttttttttagagagtctcacttcatcacccagactacaatgcggtgactcactgcaacctctgtctcctgggttcaagcgcttctcctgcctcagtctctctagtagctgggattataggcatgtgccaccccgcccagctattattatttttttgtatttttttttcactagagatgaggtttcaccatgtttgtcaggctggttttgaactcctgatgtcaaatgatccacctgcctgggcctcccaaaatgctgggattacaagcatgagctaccatgcccagcgcctcgaggacactttttaaactatgttccttatttatttataattttttttggagacagagtctcgctctgtctcccaggctggagtgcagtggcgcgatcttggctcactgcagcctccacctcccaggttcaagcgattctcctgcctcagcctcttgagtagctggggctacaggcacgtgccaccacatccgagtaattttttgtatttttagtggagatggggtttcgtcatgttggccagcctggttttgaactcctggcctcaagtgatccaccctcctcggcctcccaaagtgctgggattacaggcacgagccaccgcgcccagccccttgaggacacttttttaactgtgttcctgaccttttccctggtctcagaagtttgctgtgagcccttgatgtacccacaaacacccttgtcctcccaggacactcccacattcacctttgcattttctgccattaggggagatgacatcttcagatgatggtgagaatgtgcccgccagtgcggaaggcaaggaggagcctcccggggacagagaaacaaggcagaagatggagctatttgttaaggaaagctttgaggccaaggacgagctctgcccggaaaagccaagtggagaggagccgcctgtggaggctaaaagagaggatggaggtccagagccagaggggaccctcccagctgagaccctgctactgtcgtcacctgtggaggttaaaggagaggacggagatggagagccagaggggaccctcccagctgaggccccaccacccccgccacctgtggaggttaaaggagaggatggagatcaagagccagaggggaccctcccagctgagaccctgctactgtcaccgcctgtgaaggttaaaggagaggatggagatcgagagccagaggggaccctcccagctgaggccccaccaccaccgcccctgggagctgccagggaaggtaatgtgagcggagaaacacacacagacacacacacctctcagggagccccagccttcgactcacgtctctgtgggaccaggggcctgagtttcacttcttctgtattgctgtttctagaagataatggacactagttatcttgttttctagaacagggctgcccaacagaaatggaacaggagccactactagattctctaatagctctatttaaaaaagtaaaaggaactttcggaggccaaggcagaaggactgattgaggccaggagtttcagaccagcctcagaaatatagagagacctcatccctaccaaaactacaaaaattagctgggaattgtggtgtgcccctgtagtcccagctactcaggaggctgaggcaagaggattgcttgagccccagaggttgaggctgcagtgagccaagattgtgccactgcactccagcctgggtgacagagtgagaccctccctcaaaaaataaattaattaataaattaattaaaaagtaaaaagtaaaaaaacagtaaaactattaatgacatgtttaatttaacgcaatatataaaaaatataatcatgttaacatggaatcaatataaaaattatcagtgagctattttacttttttcaaaaattaagtcatcaaaatccagtatgtatttgacatggctgaacggtaactttttactggtgaaaggtaggccattcatctctgacataaacgaagccccgagagcaatggagggatcagagcacaggacccaaggatacagcccgggggaaaagtaggggcaggccttgcgaggtggctcacacatgtaatcccagcactgtgggaggccgaggcaggcagattgcttgaggccgggagttcgagaccagcctggccaacatagtgagaagcccccttccccgcaacccccaagcctctacaaaaaacaataaattagctgggcatagtggtgaccacttgtagtcccagctacttgggaggctgaggtgggaggggaaggggatgggaggtcgaggctgcagtgagctgagattgcaccactgcactccagccggggtgacagagtgagaccctgtatcaacaaaataaaaataagtaaataaaaaggaaaagtaggggcctggatgaggaaggggctcctcgcgattccacattcctcaggcgatctcacagttatgaaactgcacaagctctgaccctggtgcagcaggaggggcgtgtgcctggctgagggacaggctggcggtgggctgtgaagcctgcccctccgtctctgagcgagtcgcccctgctggcatcccttgtcaccctgcagtcggctgccatttccaagattcctgcggctgctgctttgactcctggccggtgctcttcatctcatgggattcgcctccagattacagaaaagggcagccgttccgttctttttccagcagacagaagcctgtggtgagctgccgtgtttgtcatggaggctggcctttgggccctgaggagggtttttgtcttttttttttttttttgagatgaagtctcgctctatcacccaggctggagtgcagtggcacaatctcggctcattgcaacctccctctcccaggttcaagctattctcctgcctcagcctcccaagtagctgagactacaggtgcccgccaccacacctggctaatttttgcatttttaatagacacgggggtttcactgtgttggccaggctggactcaaacttctgaccttgtgatccacccaccttggccccccaaagtgttgggattacaggcatgagccaccgagcccggcccttgggagcccatcttcaccgtaggctcgtccatctgcctgccgtgtgttaaactaactccaagacttgttgttgctctttagaaccgactccccaggctgtggccactgagggtgtattcgttacagaacttgatggaacgagaacggaagatttagaaaccattagactggagacaaaggagacattctgcattgatgtacatgaagtatttaatcttggagataagtatcagttttactgttagtaaaataggtaatcagatgcagactttggagaccctcgataccccaagtgtggtccttgggccggcaggcctggcatttctggggcgctggttagaaatgcagactcccaggcctcaccccaggcccactgattagaatccaactttcatgcactgccctaggtgattcgtgcacatgcatgctcaagtttggggagccctgacccaaatcgctacccttgaaccatgtctaccaaactcttgattcctttttgccaaagaagctatcttgctaagtggttctgactagttgccttatccaaattcgtggtgagagttacattgtatcatcagttacattgtatctttatacattgtatcttttcccccctccgtggacaccgcccagcaggtagcttaggctctcactggccttctggctcatggaggtgtgacggttcagtgtcccatccccttgagtgaatgtttgatcgcagccttgcctgtcactcttccctgaagctcttcccattttgttgacagtctcaaatgcttaggcccacaagaatggtaccatgggaattcacacattgtctcacaaccccccaagaactgtcctttgatggggcacgaataggagaggcatttctgggtacctctgaccttataccttggagaggtggtcccctgcccacttccttgttaaacttcttctaaactggtgtttctaatgttcaaacttcagaatttcacatggcccagtaggagttaaagtgatcggccaggcatggtggcttacgcctgtaatcccagcactttgggaggccgaggtggctggatcacgaggtcaggagatcgagaccatcctggctaacatggtgaaaacccatctctactaaaaatagaaaaaaattagccaggtgtggtgatgggcacctgtagtcccagctacttgggaggctgaggcaggagaatggcaggaacctgggaggtggagcttgcagtgagccgagatcacgccactgcactccaacctgggcgacagagcgagactccatctcaaaaaagaaaaaaagagttaaagtgatcacggtcagaattcacagtgggtttctagttttctggagctatgtaaaaaaaagaaacaaaggccaggtgtggaggcttacacctgtaatcccagcactttgggaggccaaggtgggtggatcacatgaagtcaggagtttgagaccagcctggccaacatggtgaaaccccatctctactaaaaatacaaaaacataaaaaataaaaaaaataaaattagctgggcgtggtggcaggtgcctataatcccagctactcgggaggctgaggcaggagaactgcttgaacctgggaggcggaggttgcagtgagccaagatctcaccactgcactccagcctgggcaacacagcgagactctgtctcaaaaaaaagaaaaagaaagggacataattgggcaatttatctctcacatttgagaactgaccatatagataactacaacactaatagctaatgttaattggtttcttattatatgggtgacaccattctaagcatgacttgtattgattgatgtaacccttcctacaactctaagcagtacatactattatcatcccaatttcccagatgaggaaaatgagaaacagagaggttaggcaacttgcccaaagccagacagctagaaaatggtggtgggggagtaacaacctaggcaccgtggctccagttcatgcatccaaccacacactatgctgcctccccaaccacgcactggttgttatggacaaagataccgaacaaacacccacaatacaaaacaaaaaagtcctacaagttttggggaggtacaaaatatattacttttataccacatagagttttcggactagtttgtacagaggtgcatttggtttgggtcccattatttcccccaagatgaactggctgtgtctcttaataaaaaagcagaaaaaagatgtggaaattctttaaacacgtcacaccttgcaagttccctttcatttattagatccagacacctgaggtggcaacgcttgctttgtgtgtatctagagttccttttggtggggaacaggcaggcgagtcacctgagtgatttgagtaactgtaactaaggctgggttgactgcgtgtttgcctttatcgtgcctatcagaacgttgacagtgcgtgtacctccctggtgatgtgcggctcacttgctctttcaggacctacctgacttggaagatgatgatgaaacaggcaaatctctggaagaccaggttaaggtcattagaaaccattttcccacaggcagcttaattccaccttcgttcttgtcgtttaccgtttctctcctaaacttgaaagtaaaatgttccctgtgcataaagcattgaattcccccatattctttttcttttcttttcttttcaggcagagtctggctctgtcacccaggctgcagtgcaatagtgtgttcttggctcactgcaacctccacctcctgggttcaagcaattctcctgtctcagcctcccaagtagctgggattacaggcatgagccaccacgcccagctaatttttgtatttttagtagagatggggtttctccatgttggccaggctggtctcgaactcctgacctcaagtgatccacccgcctcagcctcccaaagtgctgggattacaggcgtgagccaccgcacccagcccacatcccccatattttcaccttgctgaaggaaatgccatttgttcttgttcaatttctttaagattttatgatgaaccacttgaaaatctattgctggtttgtaacagctgagtacagtgcatagttagctgaaagtactttctgtcattaagatgtatttctatgtccatcctatgaatgtctgtctgaatataggggaaggaaatgaaaacaggagaggggaaagaaaggggtgagtctgtgaggcacaatggggaattctctcagagtgacgtgaccctactccacccagaggccattactggcattaccaggagcccacacgtgccagacccgtaccctgagggagaaggaggcatcagccatcatctctgagcacgagctcagcagcaaagaaaacagacacagttactgtggggggcctgctgtccaaggagctaagtcccagagagtctgtgaaggaaacggggttcaggggcatgccaagcagagcccagggctcaggggtgcgccctctcaggtaccaggagggtgaggaatagccagtggctgggggagcagagggcagagagaagggcatagacatgagctgtgcccagggagtggccacccccaggcctaactttcagagtcctgtgttcccttgggcctttcttggatgtggcaacagaatactttgtgacattgggtgaaaaagcagaactggcatggtgcattgtagagcgattctgttgtgaaaacagaaactttcagacaccttttcttctgtaaatagaatatgtgctttccgaagattgaggtcatctcgagcttgagtgatgacagtgaccctgaactggactacacgtcactccctgtgctggaaaacctccccacagacactctgtcaaatatatttgcagtctctaaagacacctcaaaggcggctcgggtgcccttcacagacatctttaaaaaagaagctaagagggactcggaaatccgaaaacaagacaccaagtccccaagacccctgatccaggagctcagcgacgaggacccctctggccagccactgatgccccccacctgccaaagagatgctgcaccactcacttccactggagacagggacagcgacttccttgcagcctcttctccgggtaagagcgtggggccgagagcacagtggagacaatgttggctccccggcctgggatgggtggggcagggcagtcactcagccttaccctgagctttcatgttgctggaggggtcacccaggacagaccacacagatcctctgaaggtcccattcctgagttcacgggtctgaagctgccacttgctggtagccagcctgggccaggaagccaccgagccagcctcctcttgggcagccgagtctgactgtgtgtgggggtcacaatccccctgtggtcatgcagatctcctggggcgggggcctaatgaccgtgcatttccaccccctcctcaccatccctggcctcagcctttctagaccagggcttttggaggggaccaccaacaccactgctggggagtgtggggcaagcgaggtgacagccacacaagggcgtggctgcttcacagtgacccaggcccgggtgaatcacaggccagtcctagtggccttcaaggcagggaaggcaaaggggcaaaggggcaccaggcagggacggcagccagaggcctggctgcagaagacccagaaaaacatgctgaatgtaccggggcctcccctcatactgcaggctggtacatgtgcctggcagatgcggttttggggagcagccggttagtgctgagaacaagcaagctgggactgttttttcattcagcatctgccttcaggtgcactcccaaattgggggctgtgtggagcccagaccgtgctactctcatccagcacgcatcggtggccaggctttttcctgaagacagctgcctggctgactccagacttgcaggcaggaagcagggagcggcctgagtgcatttcccgggaacactgagtggccttctcttccactctaggaaccagcacagaaaagtgcagtctgagctggagcccgtgcagcctcgggcgggggcaggcctggaggacgttgaataatttgtttttgtttgttttgtttgagacagtctcgcactgtggcctaggctggaatgcagtcatgtgatcttggctcactgcaacctctgcctcctaggttcaagcaattctcctgcctccgcctctgaagtagctgggattacaggcacccgtcaagggattttcctgcctcagcctccccagtagctggtattataggggcctgccaccacgcccagctaatctttgtatttttagtagagatggggtttcaccatgttgaccaggctggtctcgaactcctgacctcaggtgatctgtttgcctcggcctcccaaagtgctgggattacaggtatgagccaccacgcccagttgaggacactgaatttggcctggactgaaccccaaggctgcccccctgtccttgcagtcacagtgacagggagaaagcacaggtcacccttccttccacagtgccgactgagagcgccgccacacccccagagacgtgtgtcggagttgcccagcccagccaagctctgcccacgtgggacctcactgcattcccagcaccgaaagcatcatagttttccccagttatatgtagcataaatggtttaattataaatgtctcccttaggcatgataaacattttaacacccacgcgagtcagtgtatgattgggctagctcctgtttgtgtgagtcacatgcaattcctttcaccagccaacctgaaaaaagacctttctcttactatgtcatcagaaaccagacagacccgggtccctgcaaaatctcaagtgagcattttccccacaggaaaacagaatcttccactgcagctagagaaactccgaggaagagggacttgatgctttagacatcaaaatgagaaggggagggaggaaagaaaggggggagtctgtgaggcacaacagagaattcccccaaactgacatgaccgtgaccctctgctcagagggcactatcgacagcccacaggtgccagacccatgtcccaagggagaaggaacatcagccatcatctctctgcatgagctcagtgtcaggtagtagctgtggcgggacgctgtccagcctaaaaaacgtgaccattccaattcatcttcagctgccaagtgtatttagtccctgaacctggatccaaggcatctccctgtaggaaacatcagaccggggcagagattgacaaagcaacccacaacagcagctgccaacggccgctgtgcccacctcatcagcagctctgcaggggcctcactccaccctcaccaaacacgaggagccagcactcctggcccccattccactggacaggaaggcgtgagaactgagggacctgcctgaggcccccacagctgaggcgcagcggagccctgcctcccagcacagactaaaatcccagcaacacaggcccaccggcacctccagcctgccttgcgggatgatcttcaggcgaatatacaaaatacaaaagaaactactactgtattttgttgccctgtcccttcaacttggctccaaattgcttggctcatcatcacagtggcctccagaaggtggcgagctctgcttctcaagtttcaactgtggaaggcacatctggtcccagaggaaggatgaggggctctctggggcttgagggcagcccaccttgtgtcctcagaagcccattcgaggcttcttacggaggggctgagagctagagaggacgggtgtgtgctgctgggagcgagtggcccggacgctggaggcctgggagtggggaggtgtggtggcacagcctggggtgtccctctggggtggtagcttggccatgtagtcacggagcatctgccgctgctctgatgggacgccctgggcgcatgcatccggagtcaactcctgggagggcggggtcgtggggggcaggggcagagcatcagcaggtggccactcagggctatgaggggagctggtgtcctctgagggatccacatggccactgagcgaaaagctgctggacagctgggtccggcgcttgggccgcctggtctgtctcccgggctccgaggtcctgccctgctgcctctcccaccaggcagcccctcggcctgcccaggcttcccccaggcgctcactgagcttgtcctctaggcctgactcgggtgcagggggtggctctgccgcagggagggagcccaggtctctctgcagcaggagctgccctcgggccatggccttgcggagcacacccagccgctgcccttcctcttcctccctccgcagctctgtgctgcccagcatctggcggtgggtgaaggtgggtgctgtccacacaggaggagccaggggcacttttagcagggccttcagccactggctgcagccggcagtgtcctgggaggtccaggaagctgtgggggcatggcagtcaggttgggtgtcgccaggaggcccagcatctctgcggaggctggagtccacctgggggcggagctgctggtagaagacatctcccgccgccgagagctggaagagcaccaggcctggtgtgggcgctgagggcatgggcgggacgacggcagccagacctggtgacgggaatgacaatgacctccagggcctagcggggggaggggatgttttccactgcgccccccaagctcactcccccaccccagcacacctatggtcggtgctttcaggcgctcctgcagccgccactggatcttaggctccagcagaggaaatgcagggagggagtcgatcctggaaggaagagactggggggggcctgccaggcggggcaccgacgccccttctcctgaggaaggacagacagctgaggccctgtccaggccccgaccgccccatctcccacacgccgcccaccctggcctggaccctcacctgccaggtgcagcagctgcagctgcccaccctggcctccgaggagcaggggctgcacgcagctgggccggggcggaggcagcagtcgggccagcaggagcggggaggggaggccatggttccacttcagcatcggcaccaggggaaggcgctcgtccactaggtagagagagaactggggcccgagaaggaagggggatgtggccgaacttgggagctgagctgtgtagtggccctccaggccccatgtggctctccaggtgagtgcagagccctgaggggcagcagcatctcccatcagcctccacgtgcctctcagacttcacctgccagccctgaacaggtgccgcttccttcaccaattctgaccgacagtccggtggacagacagaacaagtgggaaaggggtgctcagaagaggtgtgggggagccttgccagcagaaacctgcctggccttctcgcagccacccccactctcctgacccgggagcctgtgctcgaggcacgcctacgaatgtccccgggagggcgggtggaggacagacctgcttcctcagagcccccgcctcctgcacagcagaaactctccagctctgcacggaagccccaccccgaggcccctcctcccctgctccacccctggctgcacctcgaagctctactaaggggaggccctgggagagcttccccacctgcctgttagcaccgactgtgggatccactgcgtgtttgggccacagattcatccagggttgagtttggtttgctgggtggttgtctgggcccagcagagccgctggtaagcagcagcctctagtgaccatctgagacagagcagaggtggggcggggcggtgttgtgtgccactcacctgggtacagacgagatgaagagtaggggggaggcatttggggctggagtgccccaggtactgggtaagcaggacacgttcccctttctggcacgaagcctctgcccccaaacgaaaaagcaacagaccacagcccggcgggccctggaagataaacacagggtcagccctccccacagtcccaggccggtgacgctgtcctcgcccaggccgcagccagcctgggactcaccgctctgcggccgctcccgcagtcggggtgggtcctctgccgccagcccgtacctgagtgtccagcatcttcactccggtgcggtcacccacggtcagcacccgagggtgcgcagtgaagtctgcccaacgccacgaagaggagtcccggaacacgagggtctcagggtccctgtagatttgccgcagccttggggagacaggcaagccgtgggcagggggacaggctgatggggaaggggctcaagggtcgcgacatgctcaacagggcggagttcagttcgttagggtggggggtttcacaggaagcggcgatacccatcctcagggctccacaggcagacggctcccgagcggctgcagatggccagctccccgggcaggtgagggctacagggcaggaatgcattcacatcgggctgctcagccctgcctccagcccctcctcaccgaccaacctgacccccctcacctgaggctgatccccgtggcccctttctccacctgcattgcctgcagaagggttggctgccactgtttaccaaacttccacacggcacagtggtagtcagagcggacggccagcagagctgaggagggatggaaagggccaggggtcaggtagcaggtcagccagtgagggaggaaagtgtatataagggccttactttctccctggacggtgcatgtcaccacttgccggacaggtccctggagctggatgcgtccaggtttcccaaggaattggggattgtcacctggggtcagaacgacctcttggaaatctgggcctctcactaaggatcagtgcacgagctatgatcactgcaagccccccaaattcctgcccttctctggaccatgccaagagcacctcctctaccagaggcgagcccgctggaatctcctgtctcgcaagaaaggatacgcagcctgtcctgggcgcctccagcagggtagaccagctgcccgaactggggtgtccttccaggaacccaggccagcgcgcccccagtgcaggcctcatccagaagcagctgctcccaccgcagcaccagctcctcgtgcagcagctctgccaagtggctcgccaccgacgtgcccaggatggggcccccgaggatagagaagcggcgctgtcggttgctgaggtaagcccagggacacctggggaccagagaacagcaggaggatcactcggtggcactcaggggaggacaggtcccatcccaaggaggccaagtgcagtggacacatttcttatttacctagaatttcttcctttgggagaccaccccatcctgttcccatgccccggaagcaatcatgtgacccagacctggccaccaacaatattccattgcccttgccacagtgactggttcacagatgggtgtgagacccaagccaagccaaccaaagtcctttctgggacttctggtgccgcaggaaggacactggctctttccttagatcataagccatcttgctgctacctagagacagcctgtctagggaactgtgcagggagaggcaagtggacgagacaggaaagagagacacagctctatgaacattatttgaacacctggatgcagctgtgcctgaactccacaaatgtaaatctgctttcccctgagatgatttggagttggaagtctggtataagaaagtacagctcagactgcatggagcaggggggaagtgggtatgacggaaagctgtacgtgcgtcctagcacctcctacatccccaccaccagctatgcctatccatctcctcctttctcatcagccacttgcccccagggctggtgtccaccgaggtcctggagcagcttcttcacactgaccactgtcttcttcttagtgcggctctgcatggaaaggccttgtcaggctcacacaccctcgagttcacccctgaaggacagcagggagtccccacccctggagtcacgggccactcacccccgctccctccagcttgaaattctccagcatcagcttccccaggggcgcaaaggctacgtctccatgatccaagaggaaccggctgatctggggagaagaggaggccaggtcactaagcacagtctccaggctacgcagcactgtcccccgtgggcccactcacctgctcagtcacatccagcacgactcggggccgcttccgataccggtaccctccgcggaaaagcaggtcccgggcagtcaggccagggtcccagggatctgagaaggaggttacggaaagggctggggagggcacaggagtgcggccagatgccctgggcgactggaggtatccaagggtcctgagcaggcacaggcttagcagggagaggaaggtctcaggagcgggagcagtgggaagaataggtggagcagtgtggagtgagcccgggggaatgagacccttaccgatgaggggaggcagcatggggagaggcccaggggttgccggctcccacagcaggtccttggtcacatgcagtgccccattctgaagggaggacaatcgcaaggacagtatcatgatgaatgccctccctgggccaggctgtgcacaggcattcatctcttatcaactcatccaatcctcacaacaatcctgcgaagctgggatgactggcattgtcattttactgctgaagaaactgaggcacactgccatttgccccagaagacagagccggtaaagagaagagctgggatgtgaacccaggcagcctgaccccagagctcctgtttccgacctccacctgtgctggctctcaaagaaggaagcccctcatgccaccagtggctggtccacatctcacgtaacctcacttccattcaggagaccttgcagtcactctgggagcccggcaggcggctccacctccctttgctgggctggcctgggatgtttcggcccagacattcaggggacaaaagagctaggaaaccagactcccagaggagccccaatttgacgccagaccctccctcgtaaggatgccatccctgacccccgttccccaagcctctgctccactgtctctctttttatttgctcacccacttgcctctgccaggcttcattcccagacagggtgtttccaaggggaactaggcggctgaggattccaagcaaagggccagtgtccctccagaggcagcagaaaccctgcaggtctatcctcccctctcccaaccctactatgctgtttcagcatccttctgctttcattccaagctctgatcacattttgtaaacaccttatccattggataaagttcacttgtttattctcgctcaactcagctctccgttccaggaagggaggggtcaaccgactgattcaggcagcattctcacggtctcataagggacccggcatagtgggggcatccgtctagggatggcagggtagcccatgtaccccagaggaggtggcagagcctgtgtctcagcagactcgtgtgaatgccaccactctgtggccttgtcaactgatgtgaatgtgagacgggggacccagggaagggatgtccctggagctgccagggccccctgcctgcatcctcacctctgagttctggggctgggcctctggcagagtcagtgcgtctcgccagctgcacatgaaagagaggtcagggacgtcgctcagaccaagggggccggtcagaaacaatgcagggcggagggagctggggaagtccatcctggaaacaaggaccaagcaccacactggccacctcgagagactggaagctggtaaggggcgccagagttcctgaggagtgaaaagtgcactacgggaagcatatgttctttgaggaagcagataacaaaaaacaaatatgtagcccaaggccaagcagtagtgagaactgtattaaagccaaccacccgtccaggagaaggggatctggtagtgggctgagggcgtggtttcagcaaagccagccaggaaaagcctcgttgagaaggtggcgtttgagcacagcctgaacctagtgaaggagagaaccatgtacgcaactgggaagagggttccaggccgaacggtcaacaactgtgaaaatcctagagcagtgaagtgtgtgagaaaatgaggcagccagagtgagcgaggtggagagcggtggagatggagtcagaaagacggcaaggggcagcctctctcccggctcgtaagtaccgtcatcatacatttacagactacacccccaagacgctcaagttactccacagccagggactgcatctgagcatcgtcttcctactgtcaagcacagtgcctcccagaaaatgcactaggggttgaaaaaaataaatttctatcacaaggggccgggcgcggtggctcacgccggtaatcctagtactttgggaggccgaggcaggcggatcacctgaggtcgggagttcgagactgccctgaccaatgtggagaaacccggtctctactaaaaatacaaaattagccgggcgtggtgacgcatgcctgtaatcccagctactcgggaggctgaggcaggagaattccttgaagccgggaggcggaggttgcggtgagctgagatcgcgccattgcactgtagcctgggcaacaagagcgaaactccatctcaagaaaaaaaaaaattacatcacaaggctttggtaaatacagtcctctagaagtatgagcagccatagcatccctcctttttaattaacaaaaataacaggggcaaaaataacagcagcgctcgctgaccaagcgccagcatctatctgccaggcgcatgctaaatgctgcactcttctatcgccgtccctgttaacagagttcaggaaacgaaggctcagcaagaactttagtccaacagctcttagctgccacagccaagacttgattcccatccgattcagaggcagagctctgaaccagtgctctcgcatgcaccgaaacgcaaacgctagcattagaatctcgctatacaaaaatcttttccctttggccgggtgcggtggctcccgcctgcaatcccagcactttgggaggccaaggcgggcggatcacctgaggccagaagtttgagaccagtccggccaatacagtgaaaccctgtcaatactaaaaatacaaaaattagccgggcgtggtggtgtacacctgtaatcgcaactaccgaggaggctgggcacgaaaatcgcttgaatctgggaggcagaggttgcagtgagccaagatcatgccacagcactccagcctgggtgacagagcaaggttctatctcaaaaataaaatagaaacaaaaatattttctcttggaaccgcatagcctgaaacgatcctagacaggcggagggcgctggtggagagcacgaccccacaaaagccctcagacaaggcagcctcgacttccccggccggcttcccgccctcgctgcgggctctccaggaccctttagacctccaaggctacagaactcagtcggatccgcaataacgacaggccggggactgcgaaacgtgagcctgccgcggggactggggattgggggcgtccctcccctcctacatctgcgggtccgctcctcgaacacgcgcagtccgcgcggagggggcgcatgcgtgcacttacgtgaccccggcctcgtcgtggtcgtctggaaaatgggcctcggcgtgatgctcgccggaccctggcaccacgagggaaatctcaagtagaaccccagctttggcactcgggacgggtcagccccgccgcagctacccacggtcttccggtttggaccggaagtgcctcctgcggaggcaggaagtcccgcctcccagccaggcctcttagggtcctggcgcgccccctcccgggaggagagggaacgggcgtgcaggcggcgcgtgggcagcggaaataaagctcccttgagtcccaatagtggaggccgggtggacttaggttcgaatcccacatctacttcaccaatttcctcagagttgtattaaattaatcatttaacgaactcccacagaacacctactataagccagacctgtattggtcagtaggtatcctactgattgtccttaaatcccaagaagcgggctttacaaataagggtacaaatacctactaagagtgaagcttttccaggggtggtcaggcagggagagctttaggcagtggtcttcaaactctagctagcgtgcgtcagccgtagcacctggggggctagttaaaacacagtctccaattcggtgagtctggggtggggcctgatgatttgcctaagttcccaggtgatgctgaaactgcttatctgggggccatgctttaagaaccactgtccagtcataaaccttaccgttatcctaacatagtacttctcaaacttcagtgagccttagaaccacctggggggcttgttacaagtttgctaggctccaccctacctctgccccccgagttgctgattcagtagatctgggatgtggcccaagagtctgcatttctagcaagttcccagatgatgctggtccaggggccatactttgagaaccgttgctttaaagaatcaatttccaaattctcagctgtcatctatgtctttatttatttttttgagatggaggctagagtgcagtggcacgatcttggcacactgcaacctccgcctcttgggttcaagcaattcttctgcctcagcctcccgagtagctgggattacaggcctgcgccaccatgcccggctaatttttgcatttttagtagagacggggtttcaccatgttggtcaggctgagtcttgaactcctgacctcaagtgatccgcctgcctaggcctcccaaattgctgggattacaggatgagccaccacgcctggcctatattgtttttatctggaagtttttacctggactaaaagtgccagcagggctgtgttccttttgagaggctctaaggaagagtccactatcttgtcttttctggcttctggaagctgcctgcattccttggctcatgacccctttccatcttcaaagccagcaatgccagtcggattcttctcatgaggccatctctctggttttgactcttctgtctccctctttcccatgtaaggacccatgtgattatagtaggcccgcccaggtaatccaggataatctccctattttatttgttttatttatttttttgagacagggtctcactctgtcgcccaggctagggtgcagtggtaccatcatggctcattgcagcctcaacttcccaggctgagatgattctcccacctcagtctctcgagtagctgggattacatgcaagcaccaccatgcctggctaattttcttttttttttttttattttgagacagagtttcactctgtcacccaggctggagtgcagtggcgtgatcttggctcactacaacctccaccttccaggttcaaacgattttcctgcctcagcctcccgagtagctgagactacaggtgcctgccaccacacccagctaatttttgtatttgtagtagggacggggtttcaccatattggccaggctggtcttgaactcctgaccatgtgatccacccgccttggcctcccaaagtgctgggattacaggcatgagccaccacgcccggcctaatttttgtagtttttgtagagatggcatttcatcatgttgcccaagttggtctctaactcctgggctcaagctaccttcccacc

SEQ ID NO: 2162 - DNA, 2365 bp, Homo sapiens
cgagtgcgcgtgcgcagcggttgcctgggcgaccggggaagcgttgggctgtaaagactagggcgccagcggctggcgaagaaggaaagagggtactctctggctgggctggggccgtagcgacgtccgccgcgaacctgggccccccaaagctgcggggcgttcggtgtcgccgaagtaaacatgcaccctgagccctcggagcctgcgacaggtggtgcagcagagctggattgcgcgcaggagcccggcgtggaggagtctgcgggtgaccacgggagcgcaggccgagggggctgcaaggaagaaattaatgatcctaaggaaatatgtgtgggttcttctgacacatcctaccacagccagcagaaacagagtggtgataatgggtcaggtggtcacttcgcacacccaagagaagacagggaagatcggggccccagaatgactaaaagttccctgcaaaaactctgcaagcagcacaagctttatattaccccagcattgaatgatacgctgtatttacactttaaaggttttgatcgcattgagaacctggaagagtacacagggctgcgctgtctctggctgcagagcaatggaatacagaaaatcgaaaacctggaggcccaaactgagttgcgttgcctcttcttgcaaatgaacttgctccgtaaaattgagaacctggaacctctgcagaaactggatgctcttaacctcagcaacaattacatcaagaccattgaaaacctctcctgcctcccagtcctgaacacattgcagatggcccacaatcacctggagaccgtggaggacattcagcatctacaagagtgtttgaggctttgtgtccttgacctttcgcacaacaagctgagtgacccggagatcctgagcattctggaaagcatgcccgatttgcgtgtactgaatttgatgggaaacccggttatcagacagattcctaattacagaaggacagtcactgtacgactaaagcacttaacatacctggatgatagaccagtgtttccaaaggacagagcttgtgcggaggcctgggctaggggagggtacgcagctgaaaaggaggagagacagcagtgggagagcagggagcggaagaagatcacagacagcattgaagccttggccatgatcaagcagcgggcagaggagaggaaaagacagagagagagtcaagagagaggggagatgacatcttcagatgatggtgagaatgtgcccgccagtgcggaaggcaaggaggagcctcccggggacagagaaacaaggcagaagatggagctatttgttaaggaaagctttgaggccaaggacgagctctgcccggaaaagccaagtggagaggagccgcctgtggaggctaaaagagaggatggaggtccagagccagaggggaccctcccagctgagaccctgctactgtcgtcacctgtggaggctgtggccactgagggtgtattcgttacagaacttgatggaacgagaacggaagatttagaaaccattagactggagacaaaggagacattctgcattgatgacctacctgacttggaagatgatgatgaaacaggcaaatctctggaagaccaggttaagaatatgtgctttccgaagattgaggtcatctcgagcttgagtgatgacagtgaccctgaactggactacacgtcactccctgtgctggaaaacctccccacagacactctgtcaaatatatttgcagtctctaaagacacctcaaaggcggctcgggtgcccttcacagacatctttaaaaaagaagctaagagggactcggaaatccgaaaacaagacaccaagtccccaagacccctgatccaggagctcagcgacgaggacccctctggccagccactgatgccccccacctgccaaagagatgctgcaccactcacttccactggagacagggacagcgacttccttgcagcctcttctccggctgccaagtgtatttagtccctgaacctggatccaaggcatctccctgtaggaaacatcagaccggggcagagattgacaaagcaacccacaacagcagctgccaacggccgctgtgcccacctcatcagcagctctgcaggggcctcactccaccctcaccaaacacgaggagccagcactcctggcccccattccactggacaggaaggcgtgagaactgagggacctgcctgaggcccccacagctgaggcgcagcggagccctgcctcccagcacagactaaaatcccagcaacacaggcccaccggcacctccagcctgccttgcgggatgatcttcaggcgaatatacaaaatacaaaagaaa

SEQ ID NO: 2163 - protein, 603 aa, Homo sapiens
MHPEPSEPATGGAAELDCAQEPGVEESAGDHGSAGRGGCKEEINDPKEICVGSSDTSYHSQQKQSGDNGSGGHFAHPREDREDRGPRMTKSSLQKLCKQHKLYITPALNDTLYLHFKGFDRIENLEEYTGLRCLWLQSNGIQKIENLEAQTELRCLFLQMNLLRKIENLEPLQKLDALNLSNNYIKTIENLSCLPVLNTLQMAHNHLETVEDIQHLQECLRLCVLDLSHNKLSDPEILSISMPDLRVLNLMGNPVIRQIPNYRRTVTVRLKHLTYLDDRPVFPKDRACAEAWRGYAAEKEERQQWESRERKKITDSIEAMIKQRAEERKRQRESQERGEMTSSDDGENVPASAEGKEEPPGDRETRQKMELFVKESFEAKDELCPEKPSGEEPPVEAKREDGGPEPEGTLPAETLLLSSPVEAVATEGVFVTELDGTRTEDLETIRLETKETFCIDDLPDLEDDDETGKSLEDQVKNMCFPKIEVISSLSDDSDPELDYTSLPVLENLPTDTLSNIFAVSKDTSKAARVPFTDIFKKEAKRDSEIRKQDTKSPRPLIQELSDEDPSGQPLMPPTCQRDAAPLTSTGDRDSDFLAASSPAAKCI

SEQ ID NO: 2164 - DNA, 3523 bp, Homo sapiens
cgagtgcgcgtgcgcagcggttgcctgggcgaccggggaagcgttgggctgtaaagactagggcgccagcggctggcgaagaaggaaagagggtactctctggctgggctggggccgtagcgacgtccgccgcgaacctgggccccccaaagctgcggggcgttcggtgtcgccgaagtaaacatgcaccctgagccctcggagcctgcgacaggtggtgcagcagagctggattgcgcgcaggagcccggcgtggaggagtctgcgggtgaccacgggagcgcaggccgagggggctgcaaggaagaaattaatgatcctaaggaaatatgtgtgggttcttctgacacatcctaccacagccagcagaaacagagtggtgataatgggtcaggtggtcacttcgcacacccaagagaagacagggaagatcggggccccagaatgactaaaagttccctgcaaaaactctgcaagcagcacaagctttatattaccccagcattgaatgatacgctgtatttacactttaaaggttttgatcgcattgagaacctggaagagtacacagggctgcgctgtctctggctgcagagcaatggaatacagaaaatcgaaaacctggaggcccaaactgagttgcgttgcctcttcttgcaaatgaacttgctccgtaaaattgagaacctggaacctctgcagaaactggatgctcttaacctcagcaacaattacatcaagaccattgaaaacctctcctgcctcccagtcctgaacacattgcagatggcccacaatcacctggagaccgtggaggacattcagcatctacaagagtgtttgaggctttgtgtccttgacctttcgcacaacaagctgagtgacccggagatcctgagcattctggaaagcatgcccgatttgcgtgtactgaatttgatgggaaacccggttatcagacagattcctaattacagaaggacagtcactgtacgactaaagcacttaacatacctggatgatagaccagtgtttccaaaggacagagcttgtgcggaggcctgggctaggggagggtacgcagctgaaaaggaggagagacagcagtgggagagcagggagcggaagaagatcacagacagcattgaagccttggccatgatcaagcagcgggcagaggagaggaaaagacagagagagagtcaagagagaggggagatgacatcttcagatgatggtgagaatgtgcccgccagtgcggaaggcaaggaggagcctcccggggacagagaaacaaggcagaagatggagctatttgttaaggaaagctttgaggccaaggacgagctctgcccggaaaagccaagtggagaggagccgcctgtggaggctaaaagagaggatggaggtccagagccagaggggaccctcccagctgagaccctgctactgtcgtcacctgtggaggttaaaggagaggacggagatggagagccagaggggaccctcccagctgaggccccaccacccccgccacctgtggaggttaaaggagaggatggagatcaagagccagaggggaccctcccagctgagaccctgctactgtcaccgcctgtgaaggttaaaggagaggatggagatcgagagccagaggggaccctcccagctgaggccccaccaccaccgcccctgggagctgccagggaagaaccgactccccaggctgtggccactgagggtgtattcgttacagaacttgatggaacgagaacggaagatttagaaaccattagactggagacaaaggagacattctgcattgatgacctacctgacttggaagatgatgatgaaacaggcaaatctctggaagaccagaatatgtgctttccgaagattgaggtcatctcgagcttgagtgatgacagtgaccctgaactggactacacgtcactccctgtgctggaaaacctccccacagacactctgtcaaatatatttgcagtctctaaagacacctcaaaggcggctcgggtgcccttcacagacatctttaaaaaagaagctaagagggactcggaaatccgaaaacaagacaccaagtccccaagacccctgatccaggagctcagcgacgaggacccctctggccagccactgatgccccccacctgccaaagagatgctgcaccactcacttccactggagacagggacagcgacttccttgcagcctcttctccggtgccgactgagagcgccgccacacccccagagacgtgtgtcggagttgcccagcccagccaagctctgcccacgtgggacctcactgcattcccagcaccgaaagcatcatagttttccccagttatatgtagcataaatggtttaattataaatgtctcccttaggcatgataaacattttaacacccacgcgagtcagtgtatgattgggctagctcctgtttgtgtgagtcacatgcaattcctttcaccagccaacctgaaaaaagacctttctcttactatgtcatcagaaaccagacagacccgggtccctgcaaaatctcaagtgagcattttccccacaggaaaacagaatcttccactgcagctagagaaactccgaggaagagggacttgatgctttagacatcaaaatgagaaggggagggaggaaagaaaggggggagtctgtgaggcacaacagagaattcccccaaactgacatgaccgtgaccctctgctcagagggcactatcgacagcccacaggtgccagacccatgtcccaagggagaaggaacatcagccatcatctctctgcatgagctcagtgtcaggtagtagctgtggcgggacgctgtccagcctaaaaaacgtgaccattccaattcatcttcagctgccaagtgtatttagtccctgaacctggatccaaggcatctccctgtaggaaacatcagaccggggcagagattgacaaagcaacccacaacagcagctgccaacggccgctgtgcccacctcatcagcagctctgcaggggcctcactccaccctcaccaaacacgaggagccagcactcctggcccccattccactggacaggaaggcgtgagaactgagggacctgcctgaggcccccacagctgaggcgcagcggagccctgcctcccagcacagactaaaatcccagcaacacaggcccaccggcacctccagcctgccttgcgggatgatcttcaggcgaatatacaaaatacaaaagaaactactactgtattttgttgccctgtcccttcaacttggctccaaattgcttggctcatcatcacagtggcctccagaaggtggcgagctctgcttctcaagtttcaactgtggaaggcacatctggtcccagaggaaggatgaggggctctctggggcttgagggcagcccaccttgtgtcctcagaagcccattcgaggcttcttacggaggggctgagagctagagaggacgggtgtgtgctg

SEQ ID NO: 2165 - protein, 719 aa, Homo sapiens
MHPEPSEPATGGAAELDCAQEPGVEESAGDHGSAGRGGCKEEINDPKEICVGSSDTSYHSQQKQSGDNGSGGHFAHPREDREDRGPRMTKSSLQKLCKQHKLYITPALNDTLYLHFKGFDRIENLEEYTGLRCLWLQSNGIQKIENLEAQTELRCLFLQMNLLRKIENLEPLQKLDALNLSNNYIKTIENLSCLPVLNTLQMAHNHLETVEDIQHLQECLRLCVLDLSHNKLSDPEILSISMPDLRVLNLMGNPVIRQIPNYRRTVTVRLKHLTYLDDRPVFPKDRACAEAWRGYAAEKEERQQWESRERKKITDSIEAMIKQRAEERKRQRESQERGEMTSSDDGENVPASAEGKEEPPGDRETRQKMELFVKESFEAKDELCPEKPSGEEPPVEAKREDGGPEPEGTLPAETLLLSSPVEVKGEDGDGEPEGTLPAEAPPPPPPVEVKGEDGDQEPEGTLPAETLLLSPPVKVKGEDGDREPEGTLPAEAPPPPPLGAAREEPTPQAVATEGVFVTELDGTRTEDLETIRLETKETFCIDDLPDLEDDDETGKSLEDQNMCFPKIEVISSLSDDSDPELDYTSLPVLENLPTDTLSNIFAVSKDTSKAARVPFTDIFKKEAKRDSEIRKQDTKSPRPLIQELSDEDPSGQPLMPPTCQRDAAPLTSTGDRDSDFLAASSPVPTESAATPPETCVGVAQPSQALPTWDLTAFPAPKAS

SEQ ID NO: 2166 - DNA, 1213 bp, Homo sapiens
cgagtgcgcgtgcgcagcggttgcctgggcgaccggggaagcgttgggctgtaaagactagggcgccagcggctggcgaagaaggaaagagggtactctctggctgggctggggccgtagcgacgtccgccgcgaacctgggccccccaaagctgcggggcgttcggtgtcgccgaagtaaacatgcaccctgagccctcggagcctgcgacaggtggtgcagcagagctggattgcgcgcaggagcccggcgtggaggagtctgcgggtgaccacgggagcgcaggccgagggggctgcaaggaagaaattaatgatcctaaggaaatatgtgtgggttcttctgacacatcctaccacagccagcagaaacagagtggtgataatgggtcaggtggtcacttcgcacacccaagagaagacagggaagatcggggccccagaatgactaaaagttccctgcaaaaactctgcaagcagcacaagctttatattaccccagcattgaatgatacgctgtatttacactttaaaggttttgatcgcattgagaacctggaagagtacacagggctgcgctgtctctggctgcagagcaatggaatacagaaaatcgaaaacctggaggcccaaactgagttgcgttgcctcttcttgcaaatgaacttgctccgtaaaattgagaacctggaacctctgcagaaactggatgctcttaacctcagcaacaattacatcaagaccattgaaaacctctcctgcctcccagtcctgaacacattgcagatggcccacaatcacctggagaccgtggaggacattcagcatctacaagagtgtttgaggctttgtgtccttgacctttcgcacaacaagctgagtgacccggagatcctgagcattctggaaagcatgcccgatttgcgtgtactgaatttgatgggaaacccggttatcagacagattcctaattacagaaggacagtcactgtacgactaaagcacttaacatacctggatgatagaccagtgtttccaaaggacagagcttgtgcggaggcctgggctaggggagggtacgcagctgaaaaggaggagagacagcagtgggagagcagggagcggaagaagatcacagacagcattgaagccttggccatgatcaagcagcgggcagaggagaggaaaagacagagagagagtcaagagagag

SEQ ID NO: 2167 - protein, 338 aa, Homo sapiens
  VARIANT (1)...(338): Xaa = Any Amino Acid
MHPEPSEPATGGAAELDCAQEPGVEESAGDHGSAGRGGCKEEINDPKEICVGSSDTSYHSQQKQSGDNGSGGHFAHPREDREDRGPRMTKSSLQKLCKQHKLYITPALNDTLYLHFKGFDRIENLEEYTGLRCLWLQSNGIQKIENLEAQTELRCLFLQMNLLRKIENLEPLQKLDALNLSNNYIKTIENLSCLPVLNTLQMAHNHLETVEDIQHLQECLRLCVLDLSHNKLSDPEILSISMPDLRVLNLMGNPVIRQIPNYRRTVTVRLKHLTYLDDRPVFPKDRACAEAWRGYAAEKEERQQWESRERKKITDSIEAMIKQRAEERKRQRESQERX

SEQ ID NO: 2168 - DNA, 1413 bp, Homo sapiens
cgagtgcgcgtgcgcagcggttgcctgggcgaccggggaagcgttgggctgtaaagactagggcgccagcggctggcgaagaaggaaagagggtactctctggctgggctggggccgtagcgacgtccgccgcgaacctgggccccccaaagctgcggggcgttcggtgtcgccgaagtaaacatgcaccctgagccctcggagcctgcgacaggtggtgcagcagagctggattgcgcgcaggagcccggcgtggaggagtctgcgggtgaccacgggagcgcaggccgagggggctgcaaggaagaaattaatgatcctaaggaaatatgtgtgggttcttctgacacatcctaccacagccagcagaaacagagtggtgataatgggtcaggtggtcacttcgcacacccaagagaagacagggaagatcggggccccagaatgactaaaagttccctgcaaaaactctgcaagcagcacaagctttatattaccccagcattgaatgatacgctgtatttacactttaaaggttttgatcgcattgagaacctggaagagtacacagggctgcgctgtctctggctgcagagcaatggaatacagaaaatcgaaaacctggaggcccaaactgagttgcgttgcctcttcttgcaaatgaacttgctccgtaaaattgagaacctggaacctctgcagaaactggatgctcttaacctcagcaacaattacatcaagaccattgaaaacctctcctgcctcccagtcctgaacacattgcagatggcccacaatcacctggagaccgtggaggacattcagcatctacaagagtgtttgaggctttgtgtccttgacctttcgcacaacaagctgagtgacccggagatcctgagcattctggaaagcatgcccgatttgcgtgtactgaatttgatgggaaacccggttatcagacagattcctaattacagaaggacagtcactgtacgactaaagcacttaacatacctggatgatagaccagtgtttccaaaggacagagcttgtgcggaggcctgggctaggggagggtacgcagctgaaaaggaggagagacagcagtgggagagcagggagcggaagaagatcacagacagcattgaagccttggccatgatcaagcagcgggcagaggagaggaaaagacagagagagagtcaagagagaggggagatgacatcttcagatgatggtgagaatgtgcccgccagtgcggaaggcaaggaggagcctcccggggacagagaaacaaggcagaagatggagctatttgttaaggaaagctttgaggccaaggacgagctctgcccggaaaagccaagtggagaggagccgcctgtggaggctaaaagagaggatggaggtcca

SEQ ID NO: 2169 - protein, 404 aa, Homo sapiens
MHPEPSEPATGGAAELDCAQEPGVEESAGDHGSAGRGGCKEEINDPKEICVGSSDTSYHSQQKQSGDNGSGGHFAHPREDREDRGPRMTKSSLQKLCKQHKLYITPALNDTLYLHFKGFDRIENLEEYTGLRCLWLQSNGIQKIENLEAQTELRCLFLQMNLLRKIENLEPLQKLDALNLSNNYIKTIENLSCLPVLNTLQMAHNHLETVEDIQHLQECLRLCVLDLSHNKLSDPEILSISMPDLRVLNLMGNPVIRQIPNYRRTVTVRLKHLTYLDDRPVFPKDRACAEAWRGYAAEKEERQQWESRERKKITDSIEAMIKQRAEERKRQRESQERGEMTSSDDGENVPASAEGKEEPPGDRETRQKMELFVKESFEAKDELCPEKPSGEEPPVEAKREDGGP

SEQ ID NO: 2170 - DNA, 51353 bp, Mus musculus
aaaaaaagctgtggatatagctcagaggtagagtgtttgcctggcaggcaagagaggccagtcccacactgctgtaaaaaatccctccaaatagagtcttagttagggttctactgctgtgaacagacaccatgaccaaggcaagtctttttttttttttaaagatttatttatttattttatgtatatgagtacactgtagctgtacagatgactgtgagccttcatgtgtttgctgggaattaaactcaggacttctgctcgctccggtcccactcgctccagtccaaagatttatttattattatatgtaagtacactgtagctgtcttcagacacaccagaagaaggggtcagatctcattacagatggttgtgagccaccacgtggttgctgggatttgaacttaggaccttcagaagagcagtcagtgctcttaactgctgagccatctctccagcccccagggttatcttaagctgcatagcaagtttgaggatagcctgggctacaggaaatgctgcttcaaatgaaaacctattacagaggctctttaagcaataatcttccccagaatattcaaagtacaatctcaagggctggcaagatggctcaaccagtaagggttcatgctgcccaagcctggggaacctgagttcgaatcctcagaactaatgtaaagtccaggcttggtggattaaccctagagctacagagacggagacaggaggcttgctggagattcagtaccaatctagcttcagggtcagtgagggagcctgtctcaagagaaaagggagagagagagagcgatcaggacacttgtctttgtcactgtttcaccgctgtgagaagacaccacggccaaggcagcgctaataagagaaaacgtttaactgggggctggcttccaggttcagagggttaatctgtccctgatcatcattggcaggaagcacatatgtattcaggcagatgctggaacagtagctgggaattacatcttgatgggggagggggttaggcccggcttgagcatatgaaaccccaacgtccacctccagtgacacatttcctccaacaaggccacacccacacggccacacccaccccaataaggccacacccactccgacaaggccacgcccactccgacaaggccacacctcctaatccttctcaagtaatgccactccctgataactaaacattcaaacatatgagcctatgggggtcactcctagtcaaaccaccacactccccagtaacctcctctggcttcagtgtgtgtgcacctgcatgcacgggtgcacaaacccatgccctcagtaaatggcataacgtcagggcaaaccagatggcttggcatgtaaagtttgtaccatggtacacacttacctgaactcacacacactcactagtaagaagtatactacctatgtgtggtgtcaggcttatatacagtttccactgaaaagcttcttatatgttgaagaaggaaaaggattgtttgctaaaagcccacgatgggaaaaaaaaaaaagaaattaatggaaatgatatgtaaatacaaatatgcaaataagaagccactctcctacgtgtgggattctcccgggcttttcccaggcacatgcagcagttggtagagtatcatttagttaaagtgaaatatcatgttttctccaatcatgataataagtttatttgttgttgttgttgttgttgttgttgttgttgttgttttctttctagacacggtttccctgttcagccctggctatccataagctgtgtaaaccaggctgacctggaagtcacacagatctcctgcctccacctctcaagtgctgggagaaaggggtgcactaccacacccactatcacacccagatactagaaattttaagccacaagtggtgagtaaaacctgtagccccagaatttggaaggctgaggcaggaggatagttgtgagtctgaggacagcacagcatgaactatagaatgagatttttgtctcaaaaaaaaaaatagataaataaaacttaaatcttgctgggcagtggtggtggcacacatctttaatcacagcaaaaaaaaccaaccaaacaaacaaacaaaaaaaacactggctgctcttccagaggatcagggttcaattcccatcacctgcatggcagcccacaaatgtctgcaacttcagttacaggagatctgacacccccacaccagtacatataaaataaagttaaacaaaaaaaaaaaattttttttttttggtatttcgagacagggttctctgtgtagccctggctatcctggaactcactttgtagaccaggctggcctcaaactcagaaatctgcttgcctctgcctccagagtgctgggattaaaggctcgcgccaccacgcctggcttgaaacaaaaattttaaagtgaaagctactagaggaacagccactgggtcaagaaagaacttaccctagctcttcctgtttcagggaatcactacctcatggaggagtccatttgtcccccaccagcctaactctaccacggaggccacttgaagattatcagctgccacaggacatggaaatgggagagagttgggggaaggctttctcttcagccagcacgtagtcttcagttcccatggtggagcagactcttgagataggatctcacttgaacccaggctggactatgacacaccgtgtagctggcacttgccttgaacttgcgaccctcttacctcagcctcctgagttctgagattgtaggtgtgagccgccatgtctgactttgagacacgcactcacatggatccagggccttatgcaacctaggcaagcgacgccccctgctcctgagcggcacccacagtgggcgtgagctagagcactatagcgtaaattcttccccaggtctgggcgagaattctcttccagaagctgataggtctgtccctgcatcttggctttacccattctgacctggccccagtggatgagacttagagacaggggggcccagggctctctctgtggcttccttctagggccaccccacccccacccccgccgggggattctggtatagactggcatgtagggagggagggaaggaaatcagggcaagcaaatcagtcaagtgtttgctcatggaacacacagtcctggtgcaaactggggcttcgctttgtgaggctgctgctgtgtggggtgtagcagggtgggctgggcgtgggggtgagcaagtgtggtggtgttggtagtgcatttcccactgcgcctttttttattttctatactgtcaggatctgtgtctatttctgaaaggctcacctttggatttagcaactgttcgtttgcattgatagtttagcttgttattttatatatgatttgaatagacaggcggcggcggcggcggtggcggtacacccctttaatcatctgcacttgggaagcagaggcaggtggatctctgtgttcgaggccagcctggtctacagagtgagttccaggacagccagagatacacaaagaaaccatgtcttgaaaaaagcaaataaaataaaataaaaataatttaattgatgagttggagagatggctcagtgattaagagcactgactgctcttccagaggtcctgagttcaattcccagcaacctcgtggtggcgcacaaccatgaggcccccaaggtctggttgcctcagacatgaggacatcctcatgcacaccgagtgatgctacggaagcttgctccttcatttaaagctattggttgaataaagatgctacagcctgtagctgggcagaagaaaaggaggcggggcttcggtttgccaggctcggggtctgaggagaagcacaaggagggaagagagaaagactccatggataaatgatcatcgtgagaacaagggctggccagtcagagtatgagctgcctaaacagaacatgggaagttatatctcagggttattgagggaagtagacaaaatagctcagagggtagatagctgcccagctctggtgttattaaggcttattacaaatataaaggttttgagtcttttatttgggaactatgtaatcaaaggtggggtagaattccttgactagttttagctacaacaatataacaatgctcacagaggccaaagagggcatcagattcctgggagctgaagttacaggctgttaggaacttttaaattttattttatttattatatgtaagtacactgtagctgtcttcagacacaccagaagaggggatcagatctcattacggatggttgtgagccaccatgtggttgctaggaattgaactcaggacctctggaagagcagtcagagctcttaaccgcggagtcatctctccagccctgttgggaacttttttgtttgtttgcttttcgagacagggtttctctgtgtagccctggctgtcctggaactcactctgtagaccaggctggcctcgaactcagaaatccacctgcctctgcatcccaagtgctgggattaaaggcgtgcgccaccaacacccggctttgttaggaactttttaacctttggatggtgactgaactctggttctctgaagagctcttaatcattgagccatgtttccaatccctagttgttttttaaactaacaagttatgatcattagaacagaaaagcaaccaagcaaaagacaaatccccagttccgtggggcagtttgacttgccaggtttcacagagaaaagagtaaagcttttaagagcacattcctcgaaagttaagcacaattttctaatatttttactcatgttctgttctcagtgcagccaaatgtttgtactgctttcaaagttcctattattttctaaaaccaaaccaaaccaaaaaaaacccccatatcttctgctcaggtctgaccatcctgcagctggctgagcccccaatatcatagcatcctaggagtcatctcaccatgcccctctttagatgttatgataatgtgccggcagcaggtgggactctgccacgtcggattctactagatctatgtaaaggattcctcaaagacaggcttcaaagcaaatggcaaggagacttcccacagctgcataaaatctgcgaaaaaggaatatggtccttgcctgaagtgtagagagctgtatcttcaaagtgaagccatgtgggcacctgctacaggggttgaaatcaacctcatttcaaaagaaaaactaaacaaaacaaaaacaaaacacctgtcttgttcatggttggtgatgccaataaatggacatatggtttcctctccaaaaaaaaaaaagaaattacactttaaaaaaattttgtgtgtgtgtgggaggaggggcacatttcagggagaacacaaattatttattttatttcaaagttatctgaaatgggcctgccagatggctcagccagtaagggggcttgctgccaagcctgaagacctgagtttgatccccaggacccacacggtggaagaagagatctgactcccacagttgtcctctgacctccacatatgcaccctggagcatgcccacgtgccttccacccatgcacccataaaataaacatgtcaaatgtcatgaaaagactctgaggtaggcttggggctgacgcctgcccagcccttaccaatacgcaaccttaacctttgtgcaacccttgggcttccaccctgggcttcgtcggagtggaacataagtaacattgccaacagccaagagccccaagactgtactttcagttcccacttaggcagcttaatccttccgacattcctgagagcctctttgtaaagcgttgacaattggtgagatcagctcaggttataaatagccctgcctataaatatctcttcccagggaggcacctgtctccaggtgcagcatttgcctggggagggagagtcgggtgtatgctatgccaaggtggggctgggggggggggagtcgggtgtatgctttgccgagggagggagaattggatgtatgctatgccgggggtgggggtggggtgagggggggtgttggggaagtcgggtgtgtgctatgcgacctggcaggtcagcagaggagaaactttttttctttcaatttttagcttcaaggaaaatgagtctgtcaggtttctgcaggggtgcaaatacagcagtggattacaatggatgttgctggtttgtttttaaagttttgtttgtttgttttatttatgtatgagtgtgtgtgtctacatgagtttgtgaataccatgtgtgcagatgtctctagacgccagaggggggccggaaaccctaacactggagttacaaaggattgcttaccgtaaaatgggtgctggggattgtacagggatcctctgaaagaacaaccagtgctcttaaccactgagccatctctccagcccttggttcttgtttttgtctcgagacagagtctcaggtagcccaggctggccttaaactggctgtgtagccaaggatgaccctggactcctgatcctccattctctgcctcttggggactagatttttgagcctgatttttgtcagaagatcttactctgtagctctctggctgtcctggaacttattctgtagattcagctgacctgaaatatatgtctcctgcctctttttctggggtcctgtggttacaggtgcaggtcaccacacccagccagattactttgtgtgttgtgaaattctatggattccaactgaggtcaaggattagagcccagcacatcttgtatgtagttgttttattgatgtttccttagctgagcagacagatggggtttgtactaattagaattacggttccctggcaaacaaaccttttacatgttcatcccagtagagggcgccctcagcaaggagcagaaagaacagttgccgccccagggagttaattccgtttactcacttaggtgattgacaccatggtgcctagaaggtagagctagaagctgtaaggttgacttcattttattgatagtaattccttccttccttccttccttccttccttccttccttccttccttcctttttttcttccttcctttcctttgtttttgaggtaggcaggattttgctatgtaggtttagccaaccttggctggcctacaattcagagatcagtctgccttctctgtcttgggattaaagtctatgtaccaccattcttgggtctttggtagtaatgtcttaagaataaacaatatatttgctaggcagtggtggtgcacgcctttaatcccagcgcttgggaggcagaggcaggtggatttctgagtttgaggccagcctggtctacagagtgagttctaggacagccagggctacacagagaaacactgtcttaaaaacaaaaacaaaaacaaaaacaaaacaaaaccccccaaaccaaaccaaaccaactaatcaaggaaacaagcaacaggggctggagagatggttcagtggttaaagcccttgctgcttttcaagaggacccaagttcagttctcggtacccaggtcaggcagctcacagtccccggcaacttcagttccagggggtctgatgcccttctctggaaccttttcatgtctctaaggtcatctgaaggcctggcctggtggcacacacctgtactccctgcatttgggaggtggaggctggaccaacagttcagggttattctctgcttcatagtaaattggaagcctgcttgggctacatgagaccctttctcaaaaaacaaacaaacaaacaaacaaacacaaaaacaaaacacacacacacacacacacacacacacacacacacacgaaggggaaaataacctaatcatcaaggtgtttgccatggaagcatgaggtcctgatctgaacccctgaactcacatttaagaaataatgccacacagtggctctgcttattataatccctgcactggggaggttggagagcagttgcagccctggggttgaatggcctgccagacttggtaagctccaggccagtgagagaccctgactgacaagacaagacaaggtgaaaagcatctgaggtcctctgcttcacaaggtcataagggagggacacacacagatagccactgaacctggccggtcacacatgtctttgcgatttgagtggaaaaaagttttcatggggttttgtttttgtttgttttttttttttttttcattttgaggaaagtagtatttttttcttggcagctttgccccaattgtgtgtgtgtgtgtgtgtgtagtttgtattgagataatttcatgtagcacaggctggcttcagttatctatgcatctcaggatgaccctgaatttcttgattctcttgcagacagctcccaagtactaggataatgggtgtctatcactatgcttcttatttattcgaatatatgtatgtggggtgtgtgtgtatgcatgtgtatgtgtacacatgtgtgtgtatgtgtgcatgtataaaagagtgtggttatatgtgtgtattaaagattgtagtgtgtgtgtatgcatgtgtgtgtgtgtgtgtgtgtgtgtgtgtgtgtgcgtgtgcagatgcctacagaggttagaggaggacatcagattcccctggagctgtaattacagacatgggtactgagaaagaatctaaagtcctctagcagaggataaaccatctctcctaatctgagacagggtcttattttgtagcccaggcaggcctggaaaccagtatgcagcccagcctggttgtcaatgtataacccttcttttttaacctcttgagttctgagctgcctggtgaggtactgtgtcaagactttttcttttttttttttaaggtgaggtactgagagagagaacctgggacctcacagatgctggctctttgggccacaccttcaggcctaagggttttcctatcccttatacatgttccagatcttttcagtttctgtctatgatccgttttagtcaatagcaaaccaacagtgacctcttttgatgcccgccctggtttctgtacatcatttcagttaaggctgaaggcacctgctgaggctccctgaggctcgtcttaccacggggagagagcagtcctcttgataaggtttcagagcttgccctatggctcggggctgagaattacaagcagttctagagctgggcctccagggccagcctttcacctgccggtaggacagatggtagaggagtagtgaatgaatgacccagtaagggggttaaggatgccgccccatcccgccccagcaccccacgtgactgcagatagccaggctacaaagtcaacagtgattctctttccaaatgaaatgcttccttctttccacttcttccctttccaaatccaaagagcaaacaaacactgggttaggggcgccagccttggccagcctggctcatctgagtgctgacttaagttattcttctgaaggagggggaggggtggagagctctgcagcccagctcactggtagagggaacgagggaggaagagagaataagaagattcgagggaagatgcagaggagaaggaggaaggaggccttagggaggagggaaaaggggcttggggtgggataaataggagagatgagaaggcgaacaaggtagaggctgaaagaagaggagaacaacggcgtaagggaaggagaggaatggagggaaggagagagggaaggaggaaggagagcgagatcggagaacacagaaggtggtggaagaagcgaggggctggggcccacggagtggggagggaagaaggcggaggaagggaagacgaggaggaagggcccccctccagccctccgcggagttgcgcaatccgcacagactgggattggccgccggatgtgcgagacgccccgcccccgcctcgcctgaccaatgggagcgaaggggcgtggctttcacgggagtggagtccccgcgcgcgctctggctctgcagtaaccgcgggcctctctccgaggaccttagcttgctgttgcgagcggccacctcccctgcccactctcggagcccgctcgactctcgtagcggatcagggacgcgttcactggttccggcagtgtcctcgcggcggccatggccacgaagatcgacaaggaggcgtgtcgcgcggcgtacaacttagtgcgggacgacggctcggcggtcatctggtgagcaacgccgcggggccggggaagccagtagtgacctgcttcgtgccgctcgccgccgccgctcacctatgtttcttttcttcctccaacccaaagggtgactttcagatacgacggcgccaccattgtccccggcgatcagggagcagattaccagcacttcatccagcagtgcacaggtagggcgaccctcatgagaccttttgaaagagggtgggcaccctgggcagcgagctgctgggcgtccaagcagcagcagatctgggctggggctttgtttgtttgtttgttttggttttgtctttgtgtttttggagataggggctcactatatatccagggtgacctccaactggccatcctcttgccccaagcgtctagtactggtagggtgggtgtgcacagccatgcaaagctctgatctgagctttccaaagtcccgagtgtatccctcccccaccctgcccccaacccctgtggacatcaccatcaagtgacccgaggagattcctcccccggtagtgtcagtcggcttcttccgctcccgcaccctgtggtccactgggtttccaggtcagaaggggcagttcaaactccaccctctctgattggtcagtgaacaataaacgccgaagcccctgggggctgcaagctaaaggcagaacccagggccccaccctcctttctcccttccatctttgtccctatctgcttctgtacaagcctttaatttgaagagtacagaaacacgcaccaagaatgtgtatccgatgttgctataccaggcctggataaagagaagctgacttgcgaggtcccagcggccagtttcctttggagcgaatggccactggctggggtggggcatggagagctgagattgctccatggtttggtgtggaggaatcaagcagatgtgtgaccttactaaaagcatcccagggaaccctaaggtttgtgtgtgttaagcttccctgggacatgtggaccatgaaagaacacagggcctgaatggccacagctcccgtagaacagctcaacaccattggtaaagagatctctaaaggagctggtgtgcagagcagctcagcatattctggaaacagaggcagggggatggagaattggaggccagcctaggctgggcatcccccgtgccttccggaaaaagagcctttaaagagattggaagtaagagaccccggggcctagtgtctccttagctttggaacctaatgtcaaacaaaagcaggccacctaggagctagggtgtggactcctgggaatggctgtgggttagaatccctcttgggctgctttccagctgagtggggtggggccaggtccctgggggtaggggtgggggtcacagttcctcacctgatctcttgtagtgctgctgtgagattgactgatcccaagtgtgtgtaagtgttcaggacagtgctggtcagtcattggtgacaagcagaccaaaaaaaaatttaaaagccagggtcatgtgacttaactgctttctttcttcttttttttttctttcctcttttctttcttctcccccccccctccgcccccaatactgggtacggaacacagagcattgaataggctggccacatgctctaccactgaggtacatctcagccttcttaaaaagaaagccattttaatttgagacaagttcacactccttgaacctgcgatcttcctgcttctgcttcctgttttctttaattgctttctggcctcaaacttggctgtgtagctaagcctggccggaaactccccgatcctcctgcctctgcctccaaaatgctaggatcataggcttgcatcaccttgcccggtggcataactttcttaattgaatcatcttttgcatttagttcgtctcaaagggcattcactttgtgctgtgtggtactaagattagtgtgagattgtgtgtctgcgtgtaagcattctcctggctaaaatgtctcctgggagttgctgctagactctgtattcattgcttttgtaaataattcacttaaaacaacatcgctgtaaagggcgataccgcggagtcagcgcgcaggatctcagctgctccgactgcagcaaatgcttccaacgtgggacaagtgcagactcaactttcccaaagttggcgcaccatcaggaggattgtccccagagtctctggggctgggtgccgcaggtccgcttccatcctcaccgggagcccacccccagctctcctgcctctgtgactatttactccactaagctggagaaggtgacagaactggaggacaagcatccggctggtagattcccagctgatgctcctgttgccgcacatccggcctggatgctgcttgggggacacttccttcctctggtgggctgtggttttctgctcagatctcccatggctaaccctctactgggatgggatggcagtcgtctggcgtctgagctaaaaatgctctgcaggctgcttgttggtccctgtgaatggactgtgggatcgaggctgcagctgcagtctgctctctcttcccagccatctggtggacattgtacagatggatctgcttgccacgtctgctctctgtccctcccccgatgaggcctcctgagccagggaccccacccacagccttcctatttgtaatcttacctactcccactgtacctgacctgggtgtcagcgctgcttccggtgggctggctcattctgaagattgcaaaccaaggcccagagaggttaagtgacttacctgactcctagggagaacagcgccaggtctggactctggggcccatagctcttgtccccaaggaagtggtttagggtcttcttctttgtgagatggtttgcagactggaagatttgcttattgtggggtagggagagccctaattccctgtcagctgccttggcaggccccagaagaaaggctttttctcttatttccaagtacctcagcgatgtatagggtcccaccctgcctttcctgtggaattatctctcctcaataactacaaaataacagaatgagtatataaatattaaccaagttacttttcattcctgtagctttcatcctgagactctcagtgggtgcttagccccagcacacagtgggtcagcctacatccagcctgcgatggcctcctgtggcactaaaccttagcctgggtctatttgcaggagctgcttggtccgtggggagaactggttgccatggtactgaagggtgcaggctgtgccaatgttctgagttcagattcatgttcccgaagcaagaaagctgcccatctgttgacccttctgccacagtgcagacagcaggaatgtatgcttagggcatagtatgttcctcaaatgtccctgagtaggactagcattttatttggggacagaggtcctggggaagcagcgtacatgctgagatggcagaaaggtaaaggctggaaggtaggggaagcacctgagctgggggctacagggaccccagagagccacacagagtcaggaggcatcattgctcatcccacagaggttgaggggccatttgccaaccagaggggatgcactcatccacatgacagctgtagacgcggggctcataggtctggcaggggtgacaaggcagagactccagctgtctggagtcacattttgtttttgtcctgggcaggcagctcaagcgtctttgtgtgtgtgcacatgtatgtgtgggagcatgtgttatgtgtgtgtgggaacatgtgttatgtgcatgtgtgtgtgggagcatgtgtgtgcacatgtatgtgtgggagcatgtgttatgtgtgtgtgggaacatgtgttatgtgcatgtgtgtgtgggagcatgtgtatgtgcatgtatgtgtgaaagcatgtgttatgtgcatgtatgtgtgggagtatgtgtatgtgcatgtatgtgtgggagcatgtgtgtgtgtgcatgtatgtgtaggagcatgtgtatgtacacttatgtgtgtatagtgcagaagtcaatgttgatgtgtgtgtgtgttttcccatgcatgcacatgccatggtgcacatgtgggggtcagtggacagtttttgggagttagttctctcctgccatctgggttccagggatcaaatgcaggcggtcaatcttgggaacagggcactgttacccacccccctcccccagctttgccagcttgccaccttttgagatggctcactagcatgtaactgtatccagcttttctgagagtactggtcatccagacatgggtcctcatgcttgtgccacaacccctttatcaactgggccacccaactgcaaaaggttcttctaggatagttggagactccggacaaagaggtgaaaaccattcagaaatgtgtccacccttcactgtgtccacccttgttctgtccttggtcatatccattcattctgtgcacctctggctactttgtagactttactctgagaactcaggtgaaatgtcacagcaaagacatcctacactcagcatatatttcatgatctcccaggaggattggccacatgaccatggacctaatttttgtctgtgttcttgaaacatttctctatatgaattttctggttcaaagtaggaccatcctatggctgttgggccacccaccttcccttctgagaccatgttccagctttactctcttttgttttgttttgtttctttttcttgtggctcctttaaagggctatacaatatagtgcaacattgtctaactaggtccgctgctgatagacccaaaggctttgctgggagcagttttcttttggaaagaacccaggcttctgggaatgcatccagtgttctggtgtcgattttagagtctgcggggaagagcacagatgaaggatccaatctttgctctaaccgaagcctggctgtgctgtgtgaccttgggcaggtctgccagagtctctgtttctgtatgtgtgagatgaggatggttgtggttgataaagtgacaggatacagaagcgccacctggcataaaatagatgttctgtgtgtgtacagtgccaccatagctgtcttgggagctacctggcccaggcaggttgaaggaaactggatgtatggggtagtccctggagaagggcatgccaagagactgtcagcaatgattggttgacagaggtgctgggtgaatgtgatactcctaagatgctctggtcagtccacaggagagtagcctgaagccgttttgatttaggacattgatctatatcccatcttttgtgagggtttggggtgaatggctctctagatggcacgtgacccagacgtggctaattcgatcgagcctccccatcatgatgattagcccaaggtaggagcctcacatgatccctcaacctgatcaggcttgcttctgggactgggactttggacagggcggttgggaaagagtcctttaatctttctctgggattaaacccagagtgaatgaaggcttggagtcacaggacccttctgcctctgacagagcctgtaggcagcacaggcaaaggtcagggttggagaccagtgggcaaggcttatactcttgatccagccatgcttgaatctgtctctgtccttgttgacttccctgagctatttgatttctttgtctttccttctgagacagggtcttgaaactgtagcccaggttggccttgaactcactgtttagctcaggctggcctcgtagcttaagctaatccccctgagtgccatgattaaggtctgagccaccacacctgctggattctgactttaccttcaagggtgtggagtagcttggatactgtttgggctccgctgatgctttccctacattctgttgctgagtacattggctttgtgtcagccctttggatttatagcttggtgaagttttttcttgcctttgagtttgtgatcacttttgcggtgtctatttttctcatgagtagccagtgcccctccccttagagcagcttctttaatctccaccctcaggagctgatgcagccttggcagccttccctctgagttttctgggtgttataactccccactacccccctcaccaaacacagacagacacacacacatgtacacacagacactcacacatgcatacacacatgcacacacacacacacacagacacacacatgtacacatacacatgcacacacagacacagaatgaatacacacacagagacacacacagccacacacacacatgtacacacacaaacacacacatacagacacacacacacatgaagacacacacatgcatacacacacagagacacacacagccacacacacatgtactcacacagacacacacatgaacacacacacagacacacacatgcatacacacacacacacacacacacacacacacgtgtgcacacacagacccacaatgcatacacacacacagacacacacagacacacacacatgcatatacacagacagacacacatatatacgtacacatacagagacacacacatgcatatatacgcacagacacacatgcatacatacatgcacacacacacatgcatacacacacaggcacacacagacacacaccccagcctctccctttgcactttaattttcctctttgctttttctttttcttttaaagacattctcactgttgagtcctggatggcctggaacttgctatacagaccaggctggccttaaagtcatagcagcccacctgcctgtgtctgctggggactaaaggcttgagttgccactgtgcccagccttgttatctttttttctttttctttcttcctatttaacttacctcttctggtgtttctagagactttggtcttcagaaaacctctctgccccctcccttcacactgcccccccatactgcctccacccctactgcctctattcccttaccccttcccctctccccttgtcccctccccctctgcccctgcccccctccactctcccctccctcctcttgctggggctccttcacttctgtctctttcttctgcccttcttcctgcctgtcagtctgaaagaccccagggctccgcccttcctgccggccttgtctctcatttactaaatctactgaataaggcctttgggctggctggggcctcgttcttgaccccatgacctggtcctccagccaggggtgactgtctgagttcactttgggatcccccaccccccaactcctaacagtatttttatggcttttgtccagaaggcccctgtgctgggaatgacctggaccgctccctgctgccctcccccacccccttttcctcagatcttgtgggcagtcttcctccgttttgctttctaggaaggcttctctgctctagttaaggcctagggaaaacgtcccttctactctgatgtcacccttgtcctcagggagttggccatgtgtaatacgtgtacatgtatgtgggtgttgcacgcatgtgtgagagagagactgtgagagagagagaaaagagacacacacaaacacagacacacacacacacagaatgagagagagagcgagagagagaatcctatggtcctgaagagacttcatggttttggtatgatcttggtagctaggcctaagcacacctccccccaacccccatgagtacgccactccttgactgacctgactcatgtctactcctgtaagtgctggctctttggccttctgtttccatttcaagaaggaaatccatgctgtctggcctccaatctgaactctgttctaatgtgagctgtgtgaccctggcaagtcacctagctcctctgtgccccattgtgctcaggcaggtctaaaccagcaggctcagccaccttctgtccacccggcctgttttctcctgggcactgttttagcttagctcaagctgaccctgggccccggacctgggtgcaggccagggggttggggctgggggtagacccaggaagcaggaatgagggtgtgggttgggtgaggcaggagggcggagaagcagtacagggaattcatgccagccgctgaggctggtggggaccggatgccattctgctgggaccctcgaggatctggtaggaggctggggcacacggctaccagtttatgtctccagttcattggttaagaggtgtctccagactccagggctgcatctctggtgaatcaagcagtcagagatttcatagataggccatgagcagaggccaggtggtttgggggccagtattccttggagcgggtggcaaaccctaaagccacgcccacacatgccgtttttccctacttggatctgagcctgcctttagagctgctgtatttcatgatgctgtactgggagcacttgggagtgtataaacacagcccactattatctaggtggtccccagccgtgcctgaaggctgagcctgcacaggaagttccactgtcccctctgaagcagtaactccgcaatcagtgcagagcaaatggcccctgtcaatagccctgaccacatggctgcgttggcctcgtgccaggcgtctccctgcagtcccgtgtcccagagtgcctctcctacagacctgtgtgtactctattctcagaggtggccagcggcctcagagcatccgtccccagaggcctgtttccgagagcgaatttttatattgccttttaatatttatgtcatggatgcacttcggaattaacttgcagtagatctggcggcgggggaggggcgatactgaggcttgaacccaggcactcttgcatgcagggacgtgctaccctggagccaaccgtcttcttcctcttttcattttgccaagttgcccaggatggttttgaacttcgactcctcccgcctcaccctccctggtaactagattgacaggcctgccatagtgggtcccgattgtttcttatttatttttattgaggcagggtctgggcagccctggctggcctgggactcactgctcctgtatcacttgccaggctctgatgtctccatctttgctggtctctgcatctgtcctcgtgtacttactggcatttgattctgtcatttctgctcatccttgccaataatgagcaggttgatagtattagtaagagcagtggttaatggtggccttcctatggccttggcttttgtcctcttcttgcctctttaaggccagcagtatctgcgtagtcctttctcatgacagctcctggtcctcactctcctacttcctatttctccatgtaggaatctgtagttgcctttagccaagctaaaggtactcagctcaagcaggcaggtcatgacagggtgatgggggtcccccagtctgcgtacatttaagatttccctgtggtctacttatcatcatgggttcccagggtgggttctgcgtgtccagagaccttgtcctggggactggctgctctgtggcgttaggtgggccctccagcacccagcctacctcaccttcctgcctgttgctctgcggtctctgtttgctccttggttgccatggttaccaccagcgttcttgtcggtgttcttgtcttcatcaccgtcatcttaccagctcttttccttcctttttatctgcataatctgtctgtgtagcataggctggccttaaggtcacaatcctcctgcctcagccaccagagtgttgtgattgacaggtatgagctgttctgatgagcttctccagcctctttcaaaacttgctaggtgtcaggccaatccaagggcttgtttttgtcacctgaatgcaccgaggacagcagactgggttaactctctggagactgagaggggacttcttgccatccccttggtagagcagccagcccctcctgtgtgctgttgctcagtgagacctaggaaggaggcccagcccccacctcacggcctcatccaggccagcagctgtgtatggatgctttcttctctccgtgccctttggttaaaaggtcagtgtgcaaatgctgtcagctgctaggtggcccctgagctagctttctctgcatctcctgctctctctctggggggggggggggtgtaagtcacactgacagtgcccagggggaatggtgcctcccacagtactgagctgctgacaccgaagactgcgcgctcccgagaccacagaggtgactgctcaaggctctttctgagcgtgtgccatgcgccagcaccatctgggcactaggattgataggaacaagatgtagtcttccagactgtgtcgctggccccgatggaagagtgcctacgtagctctcagggaagcctggattcagtcctcatcgatgtacaaaccagacatagtggggcgggttgtaaactgatcacccagtcgcttgggaggtggaggaaggagagtcgggaattcaaggtcatccttggctgtgtggttccgaggccagcctgggctacgtgagacctctgggccaacttagcctttaagacttggattcaatgggatctcatccatggagccttccttgatcacagcctccagaaaaagcttacttccttccttctttgatgttctagtcacacctgagtaacagccctttgggtgtttggtgtcatcgtgctcacagttggagggtagtgatcgggtagggacgtcggtcggtcgtatttagtaatctctgaatcacaggttaactgtgcgcttgtccggggattgacttagcagaactgtgaagggcaaatcggtgcttgcctggctgccgggtgatccaaccgtcacaccccatacgccacactggcctgagggtatctggcctagtgctgtttcagcagatcatcaacagagataactgattagcgcaaacacctgtgctatgtcggggaagcctggggcgctctgtaatttgggtctcctggtccccctgttccctggagctccagagcctgccaaaatcatctcccacttactctactgcattttctcatgttctttgactaggaaagctgggtcgccagtggctgatgagaactcagccggaatggtttgggctgatgctggggtgggggaggagctagcacattatatgcaatgtgatcacagacgcaaaactgtgcacgcagatgccggtgtgcttagataaccctggagattcagcctcctggccgctgagaagataagtcactgtggacgagtcttcagtctgggcctgcgggctttctttatgtcgttcagaagtattgctgttactattcagtggttctgggattggattaagggccctgctcaccctcaggcatgattctgagctacatacaccccacctctggttttacttttctgtttttcagtaagtcccattagaccgaccacatgggccatcctcctgtccctgcagtagctagggttgaagctccattggtagaataatttcccagcatgcatatagtaaaccaggtaggtacatgtcataatcctgggattccggaggcagaggcaggaggatcagaagttcaggatcataccaggctgcatctacgtttgaaaccaacatgaaaccctgtgttaagaaagtgagacagatgtttgggacaagagggtgccggcgcaagccctggacagccaggggctgtgtaatgaagagagaccatttgttacctagcccttttcttgcaatttccaatcagcctgaggctccgaccttctggcctcattcattcattcatccatccatccatccatccatctattcattcattcattcattcattcattttcttgtgctagggatggagtctgcagactatagcaagagccaagggaggagggtgtgtggcatcagcagtgcctacagatgctgtcatgaatgtgggtgtgccagcctccttcctctgtattggaaggagagcctcatgccctctggggcctctgcctggtcctacaggagccaggatgcagtgactgtgtccagctgcctctgggctttgacaggatgtcaaagtggtgggttttttttgttttttgttttttgtttttttcttcctcccagcttcctggagatgtagccccccccccctcctcccgcacctccagcctgtaaccccttctctctagcctctcttccccctgcagccctcccctccagcctggaccccccttcagccctgtcccccagcctgtcctgtcctgtccttgttgtaccccatgtcctctctcccactccctgcctgcaaccccctccccttgggaagatggctgctcagctcttttctttggtgtgggagtgtttctcctttcagagctttgtttgcacaacttctctgaagctgtgaagaaggtcaggagctgtgtgagctaatccagggctctgggcgtgtgccctgcttttcctttctcctttcgttgtactctgaagttcagcttcagggcagaaatagcaaaaaaaaaaaaaatcattctctttttttctactttctgttggcccacggtttatttatccattgcctgtggtgtccctggcacagggacatgagaactggacagatgggcgaattgcttaaaagatttgatttgtggtaggtaggtcacccctgcagtgacagcacccggaaggctgaggcaggagcatcgttgcataagtttaaggccagtttgggctatgtagtaagttccaggctagctagccctggctaaagaacaagctaggctctgatcgaaacgttcccagagccccttccatcagcgcctttattttccctcgttcaagtttctgcttactccacacccagtgtgtgtcacgcgtgataaggaagtcactgagagctcactcagtgttaagtgctacctggcagctctttggtccctgggcctgccctgaagcgtcagtgtggatgcagtgttgggagatgggggcggcattgtggtgggagggggaggagggagatgagccccaacttaagggtccactaaggtttttaaatttgggtgggtaagagcagaacagcacacacgatcagcatagcagggactctatgttggtatttctttgggggacatcaccgaagcagcctgacctagtggctttgtagattgcagacaattctgacttccttttctgttatctgtctgtcttcccctcccccgtttatggtcactccatccttagttcacactctgcctctcagttccctattgctgtccttgcctggcatccccttgcccggaccccagctggctctcctctttcctcctgctagggaccctccgccatgcttcatctcctaagtccttcccccttcctagattagagggaggtggggagagggcacatttggggataaagctgaagagtggtggtataggccatcgtgaagagaggggacatgagaggaacccaggcagatgcgggagggccctggtggagcaccactcaggcagtggcctgagcactcccattggcttcccactattgtttatggggtgctcagtcgatggaggcctggagctttgcaatcagcagcctgtggtggttgtctccctgctcccacagcttccatagagatcagcctgcgaagaggcagtagataagacccagaaggggttgggggcgggcattgtagtaaccccgtggctctcatgaagagagctcaccgtattgaggggaaggctgttaaagttcctgaattggaggtgaagagttctgtgtagtcaccccagacctggcacgcacagggaaggtacagaattgtgtcaaccttccggcatgggtctggcctcatcttatccttggtgacatccctccatggggactcaaatagatttgtgattcgtgccccagtccttgggataaggcttcccgacgatgacgcattaggtgagcagggagttagacaagcaagtctggacgccctgacactgctcaaggggcctccttttctgctgtggcttttggggggtttggggggagggtgagtctgagggatagccttgtttgtcaccttgatggttatgcctctggtcctgcagagggtcatgtagaagacctgcagcgggtcatgtggaaaaggcggatcagacccttcaggaaacttggcctgattacttccttaaaatgaagcggcgtgaggcaggaggaaggggtgggaccggacttcaaggacttctgcttttctgtgctggagccctcttgtcccatccgttgtccccactagctgcgtgtcccatccctacactggatcccctacatccccaccttgccttactctttccgtagtggctctcaagctttggctcattcaagtcaccccaaaggcatgttcaagctcccctcctgcgctgcctcctggagtttccagacaagcagagtgcatgtccttctgggtcatgtgtgttgaaaggcaagccaggactgtgcacttattgagaactagacttcagcaagaaagcgacttcttttgagtacactgtagctgtcttcagacacaccagaagagggcatctgattccattacagatggctgtgagccatgtggtcgctgggaattgaactcaggacctctggaagagtagtcagtgcttttaactgctgagccatctctcccagccccccagaaagcagcttctaactcactcccataactctcaacccataggtcaggacccttttgtgggtcaaatgaccctttcacagaggtggcctaagaccatcgaaaaccagatatttgtattacagttcatagtggcaaagttatagttataaagtagcaacaacaataattttatggttaagggtcaccaaaacatgagggggttgcagcgttagaaagtttgggatgcaccattctacttccttgccacccaagtcccactggggacagggtatcactgaggaggatggcagcaggcccaggtgccagccttctgatgagtgttccaccttagcacacgtgtgcatgtacacacgtgtgcacaggtcccctctgctcatcggccactcttgcactcctgttctgagaagagggtggcttaggtagtgtgctcagacagctttgcgccctcatttttggagaaagcggtgggagtggacttccggaaagggctgcccactcgccctgtgctgtcaggatggctgcaactgcctccagcttcaatgtggtggtagaaatgccgcacaggccttgtgtccaccctcagctgacatcctgtccagccgggtctccagcgtccagcatttgtaaatgctatcgctccggatttctgaaaatgtgtctgtcagcgatcttgaacaaactgctgctagctagctaagcacccagccagtcagtcactccacatgtggtttgcctgcctccctcccccacggttgtttaaatgaagaagtcagcatgaggttctggaaggttcccaaagcctttaggggtgtgtgtgtgtgtgtgtgtgtgtgtgtgtgtgtgtgtgtgtgtgagacttattttctgtgcaccaaggatacaagttttactgggtgactgctagagactcttcaaaggaaatctaggggctgacaagatggctcagtgggtaaaggtgattgccacccaagtgtgacgacctaagttcagtccccggaacctgcataaaggtagaaaaaggggatcgactccattcctcctctgacctccgtatacacaccctgcatcacttatatgctctcaaaataagaaatacaactaaataaaaaaatttttaaaggaccctgttcttttatgtttaacccaaaccatattggagtatacactcaaacatttcagtgctgtctggggtgagtgtttgcaatggatgaggggcagactttgagagggccatattttgaaagtcccttgtggcacaggaaagctgtgaccagcagtcagggagggagagctgacggccctggcaggctctgcacttggctggatgaagggtgaggtcaggggctccagccactgtcccacacaaagtctttggcaagggcccatagttgctgggccccagactccatgctgacacagcggagctgggacatcgtcaccatgggaacggagactggtggtgttttgtgtgaaggctggtagggaagtggctgggatgggtgcctgcctcccctgcaggtcaaggatgaaattctgtcaaacatttcagtgctgggtattggacacagtgcataagacactgtccacagccccaccccattcatgctgggagatacactcagatactggtggtgtgcatctacgccagctacaaggcccatgaccacacaacctagaaaccttcatcttcaagagttcaaggtgagcccaggccacatagcagcaccctggcaaccctgagccatgacagtaatttcagatagaagtttctatctggtaggccaggccaccagggcttaaatgtctcctcctcacggataatgatagaagtatggagctaacattttggaagccccggggagacagagacaggagaatacttagggcttcctgactggccagcctagcatacctggtaggtttcaggccagtgagagtccctgtctcaaaaaaacaaagtagatagtacccgaagggtagcactcagggttgtccgcaggccactacacacatgcgcgtgcacttttacccacacacaggtgtacagcacacagatgacccctgagaacacagtgacttaagaactccatccccacagggcacatgtgacatcatgtcatgttactcatgtaactatctaaatcagggatctcagtgaatccagagacagaggcaggttgctggttgccgggggctgcctgagcctggaagcagctgctcttgggttcgtgtttcctttttggatgatgagaatgttctagaattaggctacggcgatggttgcgcagttgtgtcctttaaaacgatatgtgtgcgtgcatgcccaagtgtgcttttttttaaccagtgacatttttataagttccttactgtcataacatttagattttgaagaaaagaattttaaaatgtagaatatctctacaatcctgttgtgcgagtacaaagcacttggactggcaagagagttcagtggggaagggggcttgccaccaggcccaacaccctgagttcaatccctggtaccaacatggtgaaaaaagagaatagactttgcaaaattgtcctctgacctctgaacatgtaacatggccttcatgaatgtcccactgccactggctgcccagtggatgggtagttcttcccctgggggacagctgaaagtgtgtagagttggctcgtcagaccttaaggatgctctaagtggtgtctagtggtggaggccagaggtatcgtacaacaccctgtatttcattgtatactggggacacacttgtatccgccttctttctgggcacacctgtggctcatggcctctcccagggacatggtgtcagggagtccttaccgagtgccatgttctccctgtcttggccacagatgatgtccggctgttcgcctttgtgcgcttcaccaccggcgacgccatgagcaaaagatccaagtttgccctcatcacatggatcggggaggacgtgagtggactgcagcgtgccaagacggggaccgacaagacgctggtgaaggaggtggtccaggtaatgtgcgctgctgcgtgtcaccaagggtcaccatccagttgcagtgggtgggggggctgtggggtggactctggagaatattaacattgttcagggagctggccagggccagagctctgccatcttgactgttacaccacagaacatagcagctggacgtcagctttgcacagccagcagctcacagacaaggtgaccagaacggagactactgcctgtcccattgtggaggggtcccagaagtggccacggggatgtaggggagagcatgtgacctttcccagttcctgtggtagggtacacaacacgggtgtgttgtcacagtttggtaacttaagcatgacagtagtaatgccaacagacagcaccacagacggtgaggttgttggtttgctggtttgggtgaggggccacctcaagaaaggaaaatctgagccgggcgtggcggcgcacgcctttaatcccagcactcgggaggcagaggcaggcggatttctgagttcgaggccagcctggtctacaaagtgagttccaggacagccagggttatacaaaaaacaaacaaacaaacaaacaaaaaaaaaccaaacaaaaaaggaaaatctgaatttattacagtcaggcaaggtgagtgtgcaggagttcccaaagtctagaagccagagcccttcttttagcttatccaaactgctgttcaggtgaccggggtaggtgtggccagccctcttcagtctgtctgttgcccaggggcaagtgacttgtgcaaagcgaaaagatggggcaggagagatggttcagtggtcaggagcattggctgcatccccagagagccttgtgtgcttcccggcacccacatggcagctcgcagccctctgcagctgcagctccaggggatctgatatcctcttctggactccacggtgagcgttgtggacatggtacacagacatatatgtaggcagaacacccagatgcataaaataaaacaaaaacaaaattaccttggctcccattggctctctggttgacatttaaaaaaaaattaaaaatttaaacaaaggggctggagagatagctcagtggctaagagcacttccaaagagcagtggttaaggctgctcttccaaaggtcctgagttcaaatcccacaaccacatggtggctcacaaccatctgtaatgggatcggatgccctcttctgctgtgtctgaagacagtgacagtgtattcacatatatataagatgaataggttaattaaaataaaatttaaaccaggtgtcttagtggggttactattgctgaatcattatgatcatacagcaagtcggggggcagggagggttgattcggcatatacttgcttccatgacaccttttatcactgccgatgcagagctgtggaggggtgctgcttgctagcttgctccccatggcttgctcagcctgctttctcataggacccaaaacgaccagccccagggatggccccacccacagtgggctggactctcccccagtgatcactagttaagtaaatgctctcctggcttgcctgcagctggatcttcttagaggcattttctccgttaaggctccctctcatctctgacgaccctagcttgtgtcaagctgtcctgaagctagccagcagacagggtctctctgttaggttgctctggcttcttcctggaactcactctgtagaccaggctgacctggaactcacggagatgcccctgtctctgcctcctgagtcctgggattgaaggtggaggctgaccgtatccagtttcttctttttcctttgagttccgagggtcaagctcagctcctttcccgtgctctttacagcctgagttgctcgaagccgctatctgttggcctctgtagaatccctaggaggagttccagggcttacaagcctggcagtcggcttaattggatttaaagtaggtttttatttaattctgtttcgtgtgcatgtgtattgtggtgtgtgtgtgtgtgtgtgtgtgtgtgtgtgtgtgtgtacatcgccgagaacacatggatagcattataaagccacttctctccttccatctttctttggcttccagggacacattcaaatcaccaggcttgcaccatcagcacctttgcccactgagccattggctgtaatcccctcctcccccattattttactctaatataactttgttgagatagagtagcccagcctgaccttaaaacttagggtgcttctcctgcctctggttttcgagcgctaacaagtgagccaccagccgtggctagcattcatctagttgcttataacacgcttgtgattttgccctgctgaggctccaacccagggcctcgggcatgcactctgccaccaagctgcagtccctgccagggctttccgtgagcctagcactggctgtggtggccaagcagacccatgagtaggggtgactcagggactgcggtctctggtgtagccttcgcggtgggaattctagttcctggctgtggatttgcaggctcagagaaggttgaactggccggctctctccagagcagggtgagaacagagggactcatggctgggtccaggctccagttggcctcctgtcctctcctggttctgtttctttctggatttggccaccctctgcccagcagaaggaatctccaggctttggtgatccatcaaggtcaggacctcagaagagaggcccactagtgatctctgtggtagccagttctgtaaaagacccccgaccgccatcttgggccaggagtgggtgttatgaggtcccagttcagagccctgctgggaggtgaggtgtgctgggggtcgctcaaatgaggagctgggattcctgggcaggtgggggtacatgcctgtaaccctaacacctgagtgtggaggtaggaggattagggattgaggcctgcctggaactgggagtcagaaaggtctgtgtttagagctgagccctgtccacggctgggaaaaccagacagatgcccccttctccaccaaccaaccacagggctgcagggagctggactgttctaaggacagtgccccgagttggggaatgtgctgagcagacagctctcctggccgaggttgccatgccacactgttgtgcccgggagagcacacccggtctttgttctggtgcctctgcaggcttctgaggacaatgtagtggacagcaggggagactacccggtgccatggcaagctgccttgtgtcagagtggatcaggcaggccttgcaaaatgctctaactcacacgcatatatatatatatgtgtgtgtgtgtattcatgattattgagttaaaaatattatgtacatataaacaatgtgtgtgtggggcgtgcatatggccgtcagagaacaatgtcatggggtctcattctttcctggggtttggggtcgaaatccagttacaggtagctgcaagctcctgtgcctgctgagccatctttcttgcctaagggagactgttttgaagatggggtttcatctagaacatagaggggagcctgggaaggctttaagccagggagagaggctggctttgctcagggagaggccccacataaaccaagctgcttcaaccagctggccattctgtggctagctatggcttgctgtccctcaccagactccagacccactcgcagcccatggccagcctgcctgtctgggtgtgatgctttcgaggtacctagcagccaggcccagcacagaaccatgaaacaccccctctgtgccagactgaaggtgtgagacctccctatgatggcccaggtaccccgggcatgttctggggggctttgcccttttctggcacctctccattcttctgtcttctggtgatttgcctctatacggtccctttcagagcaaacctacaccacacacagtttgtgtggcccatggtcacggcagccaggcactatttggtgagagcccaccacagacatgagtctaatgctggtcgtgtgcagtctttctcgtgtagacctcagccccccattggttaggagctcacacagatcatcatgtctctggttcctcacccccctgaatctctgtttcctcgtctgagcaatgggatgccagtctaacacacggaagcaggggaataagaaatgagatggcctgtagggtgagtgcgctgctatagatacctagttccttccttttgagagggtctcatgttgcccaggtgtgtcttgaacttaccatatgtagctgaggtgaccttgaacccctgaaatccctgcctaaaacccctaagtatccagatgataggtgtgcaccgctgcgccctgtttatacagcgctggggtggaacccagggctttgtgtatactaggcaagcactctaccaactaagcaagcccctgtttacttacgtattcgattttttgttgaattatggacacatcctggtatttgctgagagggaacatctttgaggctaaatgttgtcattttaaaacaatcctgtttactgattctttggagggaactcccaaacgtgcatgtggctaggaacaagaaattctatgccttttttttttctctctctttttctggagattaaacctacggtctcctacacgaagggtgggtgttcccttgtgtggctagttccccagccacaggcagctttgattaggcaggagttaaggatccagcctagatttgacctctggcctgtcaattgacccataggtaggggctgcttggagctctgggttaaggattctaaggttgaatcttgacagaggtctgacgattgatttgtgatgtctgccatggacatcggcgtagagagtggagtacagttcctactccttggctctcacagaactagatagagtcagaggtcaggtcgggtcgggtcaggtcagggcaggcggagtcaaggctttggtgagtgtttaggaggtggaggagccggtcccaagcactttcccctatgtgaaaaggaacagtatgggatcagctgctcagggctggctcacagcaggatcttgggacatctgtctgcttgcattctgttcctggtacctcacgatgtgcccgcctgtgtgtgcccttggttttctccctgagtaggaaggtgacttgcacctttgtatccgaatgtgtcaaccacttggcctgccgatccgtttgtttccttcatcctcttttgatgagtcatgcctgctttaagaacctggtctttttgagtaaattataccttgctggtcgggttttcagacactgaataggtgtaggaggtcacagagggggtgggagggctagccaggcacttctgtttctttctgctcagcctcctgcaaggctgccttttttcctggcaagaagggctgctgggtgctgattgcttttattcagcactcagaggtctttggcttaaaattcgtggggaattccacttggggaaaggcatttgattgttaccagtgggtgtctcgtccactgtgccttagctcatgtgtgtgggagagagtctacacccagcacagaggacatgttcctgggtgccagatgagcccaaagcaagcacggagccttaacatggaaccatgctgtgatcctgtgttggttgcccatggattctggtatccatggtgggacttaggcaggacctggggtgactgatgtggatctgtctggaggacccttatcccctccctctcctctttcacaggactggggagccgctgaatgctgctttcagggcctctgctccttgtctctcagagagagccacagcactggaatgtggcctcttggtgtatagtataggctagtgattgccttagtgagtgttaagccagtgcaggtttgggggcgcagtaaggggcgttgctcctcttgtctctgggtatagaggaagccacctcttctccgaaaggttttctcctctccggctctcctctagcccagctttggatgttgccgctgggtaggtagatatagccagcatcttccatgtttacccaggaagccctggggctgcccctctttgcaaatgaacactggggatgaggaaagggccccggacattgaacgaaccctaagcttccctgcagtcttgaggcagaagggaaagctcccatcacttacagaccagctgaggaccagtcagcacttgcccagtgctgggcacacccagcaagcgtgcaggctctttgcatgctccaaagccctcattacagcctcagcatgtggaactgtttctgctcctgtttgcagaggaggaacggaagctctggagggccaggctgctggagagcatggggcaacttagactaaaccccattctcagccagttttagcaagaaaactgggtttaagccatggagtcggggagccttcagaagagagctcggggttggggatagatctcagggggcccccagcaccacgtaagccaggctttgtagcggacacctctaatcacagcaccagagaggtggaagatcggaaatttagggtcatccttggctaccagcaggtttaaagccagcctgagtttcatgagaacctgtctgaaaaggggaagaaacaatttaaagtcaaggataagagaatacttatatgtatcttaatctagccctgcaaacaggctcatgtgtgtatgggtaggtgtgtgtgtgtgtgtgcttctgtgtgcacgctcatgtgcatgtaggggtgagtgtgatgggaggtggccttgttggtacagggatacagatgaaaatctccttgctctttctgatcttggtgttgctcctgggtcaggccttagctgtccgctgatgtcgcttggtttctgccccttttacttacctacctggaaggcgtctcccctgtggccctgggaattctccagtggtgcccttaggtctgaagctgactgctcagtagaagtggaggcggagggcaagggatccctcacataaatcttgaggttggtacttgccttggggtttccattactgtgatggaacaccattatctaaagtcaagttgaagccggcggtggtggccctcacctttaatcccagcacttgggaggcagaggtaggcggatttctgagttcaaggccagcctggtctacagagtgagttctaggacagacagagctacacagagaaaccctgtctcaaaaaaacaaaaaacaaacaaacaaaaaagtcaagttgaaggctagagagatggctcagcggttaagagcactgactgcttttccagaggttctgagttcaattcccggcaaccacatggtggctcacaaccatctgtaatggaatccaatgccctcttctggtgagtctgaagacagctacagtgtactcacataaattaaataaatattttttaaaaaatcaagttgaggaggagtgggtttgtttgccttactcttccacatcgtagctcatcactgaaggaagacaggacaggaagtgaaacgggacaggaacctggagccaggagctggtattgagcccatggaggggtgctgctgtctggcatgttcctcatggcttgctcagcccatttcttatagaacccaggggcttgtatcatacatgatgggttgagccctcccctgtcaaacactaagaaaatgtcctctgggcgtccctacagtccgatcttaactttctcaattgaggttccctcctctcagatgactctagcttgtgtcaagttgacataaaactagccagcatagtgcctgcccaagccatgcattttggaacggttagtagaattcacaccctagatgggaagcgcataccacttgtgtcaggccttttgttggggcgggggcctgtttgcctgcctgagctgcctcttccaatttcccagatggggagggactgcccttggaatagcaggaaagaggaccctcagcgttgtctccagggctgtccataggtcacttgagaccataaatgagcttggatggaaactggtaaactcatttagaaagatgtatagggaagggctggatcataggtatgggagatgcagaaggttcctggagtcaggtagggtgtggggataggtgttagctaaagactgggagtgactgccattggtccaaccacatgaagtcctcaccgtggtccaaggggtaggaatgatttcctaggctttaccatattcctgctgggggggatgtgagtctgcacacacccctgacttcagctgggcagtgtggtctcttgtggggtgaggagaacagagccaggttcatcagccccgagccaggctcgtggcgagcaaggccgcagtctgactgattgttgatgagagacatcagcccgtagcgaagacccaggctctgtctcggaaccacagtatggcttgggctccagtggcctcagaaatgctagctgcctgccttggtcacttggagggaaaaccattcaacccaagatgagggactcttgattctgccttctaactttgaggttccccagaacagcaggagtggaaggtcgtgacctggggggtggggatggggaggctggaacgtgtgatcggcacccccacactgctctcccacagtaatagtcccagaggatccgtctctggcctctgcaggcagcaactataaaaaacgaatctgcagacaaagttgtcttctgtggcagcagagaggagagaatgtcccgtgtggctgaccccacgtggctgttctgtcaactttggagacttggaagcattcgcttcatggcgatttggttttaaatgtgcctcaaggttcgaggtgttttttttttttttttaagtttgggacagtgaatatgtgtgcacgtacgtggtgtatctctggtagagtatagacgattttgcctatttacatttcttgctctgtaccattcactagtctgatctcctttttgagacggagtcacatgtactaactttgtgtggggatttgtgcacaccacagcagcatgtggagtttggacagcgtgcaggggctggcctctcctttcatggggggggggggggggcggggcagggcggggatctgagatcatcaggcttcgagacgagtgcctttaccttctgagccatctccccacccagtctcgaatttctgatcctcttctctctgggattacaggcctgcgccaacacgccaggtttatgaagtgctggggcttgaacccagggctctgtgcacgctaggcatgccctccgccagctgagccacgtgcacagcccctgtttgtttgttgagacagagttttgctatgtaacacaaactggcttcagactggtgggcagtcagtctcctgctctctgggcttgcatcccacactgcctggttgtagtgtgaccacgggacagctcttgtggttttagccatagctgcacccagcccttagaacttccctttagatttcttagtccttatcttgtcttcctaaactcttgttcctgacccagacttcaggttcttctttacattgccatataaggctgtcaaacaagcagaggactttgaacttcctcttaggcttcttgccccattgacttccttgctggggcacccgcgcccctcccccgtgccgctggcctgggagttgagacacaactctctattctctttccagacctggggtccactgccttccatggtctgggtcacatgcataagcttagcagtgctggccctggggctgctgggaagggtctttgaatttggggctgcataaggctgtctcagctctgcccccagggccttatcgtaacctggtaaaaggctaatgtattgagggtggattcagtcagattgtgtgaggcttgcctctcttggcaaatattaacccctcctccatatcctgccatgtcttggtggccttgctcatggtatctaggaagccgagaacgtgatctttctggtgctatggcgactttgctgattttggtttttattgatgtaaaatccatttaatgtaaaagtaagctctttaaccacccctccctagttccaaagcattttgctccctttcttgatatctacatatagtagttgggggtgaggacagtgctggggcttgaacccgcgccctcctgcctgctaaggtaagcactgaactgagccacactcctgctctgaggctgtagtcccaggtctgtgaccttgggcaggcattgtggtcttcagactctgtcttgtttgtaaaagaaaaataatcttgattgtctttgagaatttttatcttttggtttttcgagacagggtttcttgtgtagccctggctgtcctggaactcgctctgtagaccaggctggcctcgaatcccagagagccacctgtctttgcctcctgagtgctgggactaaaggcatatgccaccagttcctggtgtcttttggaatctgaaaagctgccattgggctggtgtggggcagagtgagctgctcttctgacccctgctggcttgcagtcacctccacgaactgtgcagttttaccacaatgcgtcttagatgacatctgccgtttcctgttttgtctcccacccctggtcacctctggtctgctttctctgtggatttgccttttttggacatttcctgtcagaggaaccagacagtgggtggctcttcatgtctgtctgtttttgcccatgttcagggatttgttcgcccatgttgcaccgggcattagaatttcatcgatgactaattaatgcgtcaccatttggaacgtccatgcattgagggtctgccttaccctctcttctcatctgatggctagctacctggggtgcttggctgtttggggtgaatcacgtagctgtgaagtctgggcatgtgtgtctgtgcccgggtgatttcatttctctcaggcagagctttcagtgtccagccctagggtcatagttgcagttttccatattttgacactgtagcttggtctcagtaccacagcacagtgtgtgtgtgtgtgtgtgtgtgtgtgtgtgtgtgtgtgtgtgtgtagcgattatggtgtcataggcctggggatgttgctcagtggtagagtgcttgcttgcctaagactagggcctgagctccttctcctagtactgatgcaggtgtgggagtacgatgtgcagtgttgaggagcatgcctgtggggtgtgtgtgtgtgtgtgtgtgtgcgcgtgtgtgtacctcttaccgtacaggcttttgttggccttaaatttctattatctgaggctggctatgaactcccacgcctcctgcctccatctccctagtactggctttacaggtaggtatgccaccctcggctcttttatgtggataatttcccaacctttggactcgtgtgcatcctgcagctttctttgtcttcccttgagattttcttggtttttattgtgcctcataatccgcatataaaatgacgtaattctcacggttcagtgttgcctgataagatacctcctgcttcacattctcacgtgggccaggccctgggctcatctgatcaaagcctaaagtcctaagaagtgaccacagtagcagtgtgtttcccaactagagctgggcgcgtttgtggaatgaacgccactaattccctgcgcacctgcctaaaacttaactaggttgggaaggctagggtacccactggtaactctggcctaataatggctgaggcggcctgtgggagccagcttctcccaaacccaggtatggcagtgacaggggtgataagtgtagccaccagccagagcctccttccttctgtgtgctccctcctgtaatcttatgagatagggtctcactgcgcagttcgaggtggtcttcggatcacagtagttttctcccaccgccttaccctcctgtgtgctgggattgcaggtccttgctagcgggtgtagctcctcctcccctccgcccctcttctggggttaacgctggccacctcccatctgttttcctgcctcacaccttcacccgcaggttttcccagatgaatttgacagtggaaagggacttgcccaaggtaacacagccaagggaagacagttcaggggtcgcgctccagtccagcccgtggactggaggccgtggcatctctaccctgctatccgggcttttggcacaggctctattggcatttttttccattgcaatctactaggagtgtctggggtgccagggcttcctgctgcgttgcctgggcaaccctggacctgcccccccacctcctccctcacagagactctgagctcttctttgtccttacagaattttgcaaaggaatttgtgatcagcgaccggaaggagctagaggaagacttcatcaggagcgagctgaagaaggctgggggggccaactacgacgctcagtcagagtagctacagccccacagcccagagccatctgcctgctccgccaaggaggagactgccgcctcacgtcaccagcccaccagggaggagaagccatgagaggcaccagcgccaccagtgtgtccaaccctccccttccctctcccccctgtggcccctctcaagctcaccaagcatcattctttgagacccgcccccccttttgttttaaagaagtcattttggtgccagggtcatgcataccatctgatcccagaagcctctctgtcactggccctggacctggcatttacccctgccgtcaccgtggcctgcctggtctaagctaccctggccttgagttgctgaggcctggtcaggtgccaccccagcttgacctggctgtttcctgctagccctacgccggccaccaataccaggagctgtgcacaccttacagccttcatgagctcccatgcgcgcgcatgctcctcagagcccatagatgtggccccaggcctcacccctgtcctgttcagagtggccttgagctgtccctctggtagacactgcttggcagtaacaggtttaggtctggcgtggaccgagtgtgaagtgacaaatttgccttaaatcttgcctggcagtggctctgccacgtggtctaaactacccttttggcgaagcctttctgaagcctgagaggtctgagtctggctggggggggggggggggggagttcagggtcaacctcagggcctccagggtgacaaggatggaaaggtcccctgcaaacagggaggctggcataggcctcagggcacctggaaggcagcaacggttggaatcttagtctgcaaattccaaagatggctttgtttgcttttgaagacagctgaggcgggcttggctcctcgagagcactcgaagatggttctttccctccctcctcgctcttattactctggggaaggatgctgcaccgggctgggctgtgaggaccatctctggcattccgacagtttacagaagtaaatgtgtttttcaagaaaaatgagttgggttgtctgcttcgtgtatgtgagtggttgtccgcactcactgaaggtgcttctggacccagggcttcccttcttcaggagcctcgggtagctcaggctatcctcaaacttttgatataggagaatggctttggcctcgaattcctaattctcgtatggccatctttcaaatggtgaagttacagatgtgtaccaccttgtcctatctcagtagccctttttggtttttcaagacagggtttctctgtataaccctggctgtcctggaacccactctgtagaccaggctggcctcaaactcagaactccatctgcctcccaggtgctgggattaaaggcatgtgccaccactgcctggctctcagtagccttttaatccactgcccccactcttccaggggatccaggttcagtctccagcacccacactgggcagctcacaactgcttgtaactctagcccagatgatccaggttaaccctgaactctctgtggcccagggaagccttgaagttgtcctcctcctgcctcctcccaagcagctaggctcacaggtctgagatgcacagccttttgttttgtttctagcgagacagggcctcgctgtagcctagactggcctcaaatttgtggcaatccccccaccccccacccagcctcctgaccatattgggattacaggtgtgtgccaccactcctggcttagattttaagtcttaaacacagaagtagatatttatcttcattttataaaaaaacaaaatcagagactgatccctcctcccctgtcacaaggccatgactgtgctgctgggtggcacaaaaccagaggtgaccccctactcgacaaactcagttgtggctggtactgcctgctcttctggttatagctgtgtgtcttcaggcaggttagtctctctgggcgttgaatgggcagcacaaactgggcatgatggaaatcccagcacctgagaggagatgggggtcgggggtcgggtcagaaggtcagagtcatcctttgttacatagtgagtttacaaggctagcctgggctacatgagacataccccctacatacacacacctcaaaaaaaagggggagacacggttacctctgcaagccttccctgccctccactctatcctgcccttgctggaggccttatgaagggtgggttgggatgggatggggaaggaaggagagccgagagaggaagcttggctgtgactatggtgtgtgtatttgttctactgttgattggtctctgggggacttatctatttcacaactacacccagccctcctggcattgcttatactccaggggttatctggggctaggtggggggtggggagccccaccctaggtcccagggcgccatccagactggggaaaaggcctcttccctgagggtagatgtcctggatttagcctgactcaatctccttgttccccattcctagagaaccgcagaaaagattaaaatggaggcagagccaggttagctccggtgaccagttaaggaagaggaggtgctgagtagaatctctgaactcaacaaaagtcttaggtagcccaggctggccttgaagtcaacacatagctgaccctacattccttattctcctgcctcaacttcttgtgtgctaggacacaccaccacacccagctttctaccaactgagctacttccctaagcccacggatgggccacgattcttctagaatattacccggaccctgtgaagcgggctaagaaggggcctggacagtaggtcccataagatatgttccaaacccagatggtggacctccattggaaaaagcgtctttagggatgtaattgaatataagatggattaaggaacatggtggtgtcaaagggagattcgggcccagacaagagagaagaaagaaaagggagtgaagaggagtcagctaaggagcccctggggcctcaggagacagtacacactctgctgctgtggtgaaccttcagtttaaaccttccttcccattgctcaccccagcctctccaggttgggactgtgtccctgtgcctggactgtccttgcccaggcaggagtctggggagaggccagcagtctggtcctgctgcactaccaggccacacagacaccagctctcagaccaggtcagcgctgtgccaggtagagccggggacttcctggttgtcttctggctgcctctacccacagccccacctcaggaaggcagctgtcttgttcacctctccaaccaccaagcctgcccctcttaaccaggggcctaagccaacccccctgattcctcctcagtggtccccagggagctgaggtaatgtgagggagccctgcagctgaggcggctgtgctctgctcgcaggtggcagatagtgactgctctgtgtggttcacggagggtctgaggacagagcactgggcctgcagggctcgaggagcccttcctgtcctatgtggggactggccgggggtgccgcctacaggcaggggttggggatcaagaaaggaaggaggtccctgggaaagaggggaaacggttctggcaaacccacacaagcagatgctaatgtgtttctttgctccttggctcatccccagaagttcccatggctgatgtcacccttggtgacgtgccaagccatggtggcacacacgggggaggcacacagtgaatcttcccagaaatcctccggcacgaaggtgggcaccccaggagagtcagtatcattcaggcacagtagtagtaacacgatctaggtgtgtgtgccgtgtgtgtgtgtgtgtgtgtgtgtgtatctatgtgtgtctaaagggggtgagtgtgtagtgtatacacgtgtgtgtgtgcctgtgtgtatctgtgtgtgtgtatctgtgcatgtgtgtgtgtatatctgtgtgtgtgtctaagggggtgagtgtgtagtgtatacatgtgtgtgtgtgcctgtgtgtatctgtgtgtgtgtatctgtgcatgtgtgtgtgtatatatctgtgtgtgtgtctaaagggggtgagtgtgtagtgtatacatgtgtgtgtgtgtgtgcctgtgtgtatctgtgtgtgtgtatctgtgcatgtgtgtgtatatctgtgtgtgtgcctaaggggatgagtgtgtagcatatacacgtgtgtgtacagatcaaaggacaatgctgagtatcttccttagctaatcgccacattattttaaatgacatgaaatgaaatctagtttattgtgtctgcgtggatcgagggggtgatgggcatgcagacacagatgccgaggcacttacatggaggtcagaggacaacgccgcggagtgtgttctcttctgtggttacccctcaaatcaccaggctcgtacaaccagcacctttgcctctgagctatctccctggctcccctcccgactctctgtgacaggctctctcaccgaaccttgtgctgtctggagcggcctgcaagtcccccatctgtgcctcctgaacactaggatttagacatgaaccctgctggagtttttacacgatgggtgctggggatctgcgctcaggcccaggcagccagtacaaccagcgcttaatgagctgagccatctctccagtctctaattgtgctttttcaaacaaatgttcccccgggacacccagcagcctgcgggatccacggtgccttcaacaggtgacttggttcaaagtccatctggaggaaaagccagcagggagctggagaacggggtgacttgcatgggtacaggcaacagtggggacaacagggggactggcttgagctgaaggtggggttcggtgacagagctgttgcctggtgtgcacagagagtttgaaacccaggactgttcaaaaacagactgaaagaaattgttccaaattgagtctgaagcctcctgccatccccatgaggctggctttgttggtctacaagatctaaaaggttgtgctcagcttttagttgtgagtcgcgactcctcgaggttgcgcatcagatctctaccttacaattcatgacagtagcaaaaaatgacagtttgggctgggcagtggtggcgcatgcttttaatcccagcacttgggaggcagaagcaggcgggagttctgagtttgaggccagcttagtctacagagtgagttccaggacagccagggctacacagagaaaccctgtctcagggcgggggagtgggggggtgggggtgggggggattacagttacaaagtagcaacaaaataattttatggttggagggtcaccacagtgtgaggaactgcattaacgggctgcagcatcaggaagattaagaaccactgatggagatggtaagtctgcacacaggagcttcctggactgtcctgatggcctccaggcctggtggctcctccagagccctgcaagtcctgcagtccccagcagcctgctttggcctgggcgctggctgccaagttgagcgcttctcgatgcctctgcttcctccagcctccagcaagtcagagcctggtgaccatcgggggccaccgatgaccactcagtcctgtcaatgacaaaatccagctctcacctccaaggggataagagacgtttagtctggagtgaccatggcggaggaagcacaggttttggttactccaaagtccatattggaacctggaatcagtttcacgaagattccacaggcagagggcaaaggaaattaacatggcaagccggttacagcaaagggcggtctcggtgttggctgagacgcttagccatttagttagtgggaacatggctttattaacagattccgaaagattttatctgttagtcacagaatggtacctctgacagagagggagggaatagctgtttaggaggctaaagagagtccaagataaattgaaattaggctctggactgccaacctttcaacctctctgcagccgctgaagggcacaccagttatccggctttgtggaaggttccattgaacgtgcaaagtctttctgagacttttgttcacagctcagagtgggtgctaactaggtgggggagcacacagaggcgggtggcttgcaattccgttctcctttcagagtggctctcttgagaagggtcttggacctgtggggacagatgccagccctgtagccccaccccacccctgcaaggtgagtcttaggtcctttaatggccatttgcttagtgagagcagaaagagccacacctgaagacagaattgtaaggcagactccactctccatcctactaccgaatctgcccactgcgggtgggagagggggcatgggacgagggtagtctacaattcccaatgcagccccaaggccccactgacccagtgtgaggtccatccttggctcatagccagcctatcccacttcaggctggaaaagaaacgtggggtccattttagagatttttttttaatggacttaatttttctttaaaaagtttttagcttggcacgctaaaagcacggaggtggccgggcttggctggcacacacctttaatcccagtattgaggtggcagaggcaggtggatttctttggagtttggggtcagcctggtctacataatgggttccaggacagccaggactgaatagtgagaccttgtctcagcaaagcaaagcaaaacaaagcaacaaatgaatgaaaaactataagtacaataaaagtcccacaaaaacaaagaagacagccgggcatggtggtgcatgcctttaatcccagcacttgggaggcagaggcaggcggatttctgagttcaaggccagcctggtctacaaagtgagttccaggacagccaggactacacagagaaaccctgtcttgaaaaaccaaaaaaaaaaaaaaaaaaccaaaaaaaaaaaaaaaaaacccaaaccaaaaacaaacaaagaagacaaaacattcatatgctgcctcccaagggtcaccattatcatcacatataggggtatagccctctagactctttaatacactgtgaactctcatgtcttcaaattgtgaccatgtttggtcatgtgtgtgtacatgtacccgtgtgcttgtgtgtgtgcgcctgtgtgtgtacatgcttgtgattatgtgtatgtgtgcgtgcgtatgtgtgtgtatagactctagaaatcaatattgagatgtgtttccttgatagctcccacccatattttatcttacttgtagttgtttggagggctggggagatgaccccaggtaaaggcacttgctctctagcctgggcccagagttcgatccctgggatccacagggtagaaggaaggcaccaaacccactcctgtaggttgtcttttgaccactagtcatgcagaccccaaccctccccccatgcatgcacttgtgcatgtaatactcacagaggccagtagagggtgtcagatccctctggagctatagacagctgtgagataccatgtgggcactgggaattgaacctgggtcctctgcaagagcaaccagtgctcttaacacaaccaaatccccagattgtgtagtgtacagcttgtataacagtacccagaaaccccctcttcaaaatttgaatcagagagacttctccgattagttctcagcttcttttagcacacctgaagatacaatcaccctgggcttacatcattgcagtgtgtctagggctaaaacccagtcaaggctgtgtgctgcctagcttttatgttaccttgacacagctaggaccatctgggaagatgcatttttttttttcaagagagggtttctctaggtaacagctgtgcctggctgtcctggacttactctgtagaccaggctggccttgaacttacagagatctacctgcctttgcctttcaagtgctgagatcaaaggcgtgctccaccacacacagctaaaagaaggaatcgttgagaagttgtctccgtagggttgatctgtaggtaagtctgagggggcattttccctgatgcttgatgtgggagggcccagctcactgtagacagtgccatgtctagccgggtggttctgagcaatacaaaacagcaggctgagccatctatgaggagcaagccaggaagcagcactcctccagggcctctgcatcagctcctgcctccgggttccaataggttctgtagatgatgggctacgggctgtaatctgcagtccccacccccacccccgaattgcttttggtcatggtatttatcatagaaataagaaccggaactaagacaggctgcctgggctggagagatggctcagcggttaagagcactgactgctcttctgaaggtcctgagttcaaatcccagcaaccatatggtggctcacaaccatccgtaatgagatctgatgccctctaccggggtgtctgaagacagctacagtgtgcttacatataataaataaaataaatcttaaaaaaaaaaaaagacaggctgcctgtgaggggaagggtaagctgcctgtgaggggaagggtaggctgcctgtgaggggatgggtaggctgcctgtgaggggatgggtaggctgcctgtgaggggaagggtaggctgcctgtgaggggaagggtaggctgcctgtgaggggatgggtaggctgcctgtgaggggatgggtaggctgcctgtgaggggatgggtaggctgcctgtgaggggatgggtaggctgcctgtgaggggaagggtaggctgcctgtgaggggatgggtaggctgcctgtgaggggatgggtaggctgcctgtgaggggatgggtaggctgcctgtgaggggaagggtaggctgcctgtgaggggaagggtaggctgcctgtgaggggatgggtaggctgcctgtgaggggatgggtaggctgcctgtgaggggatgggtaggctgcctgtgaggggatgggtaggctgcctgtgaggggaagggtaggctgcctgtgaggggaagggtaggctgcctgtgaggggatgggtaggctgcctgtgaggggatgggtaggttgcctgtgaggggaagggcgtgctcccctcccccaccccatctccctggcatcctttcttcagctccttttgccttcgcctctggatggccaggtttctgccctggctggccctggcattgttgaataactgaaggaatttactttctcaagccacaatagtttatagagtcagaaccggttagtcacacttgttgtaaacagcccagatgggggttgccatggcaactctgggactatctcttagacagcttcagggatgaaggcagagcatcctccagggagcagcaccccacccccacccctggcacagccgagattcagctggcactggggccaccatcctcttaggctgtcttaatttcctctttgtgaaccccacattgtgcagccaccttcaatcataaacctctttgggcctcagtttggtccttatgactttaaaaaataagaatataatgacagtcttcatcgtaaagattgctaaggaacacacagcatgtggttggtgggtcacaaatgggggattcagctcagtgcccggcaaattgtggtcactcactgcaggacagctattaaggttgtgatttgcaaactgggttcaatggctgacatctgcattctcccttgggaggctgaggtagaaggatcagggggttcaagaccagcctgtggtacgaagtacctgccgttatctaactatgatgaggtcaaaatagaaaagcttcccctcaccatgggctgtgtaaggaacagcagaggttacctaaggaacccggatgtggggtgccaaggccctccttgttacggggactaagaaggtgtcctgggatccggtggctcttgcccatcccccagctgtccacgtctcccagaggtctttgcagttcctaactttgttttccgccttctgctctttactccttgtggctccttgggtgctgaggatcgtccagggctgggatgtagctcagtgggagaacgcttgcttggtgtctgcaaagctctgggttcacctccaacaaccacaaaacctaagcagaaccaccaccaccgtcaaaatggaatcgcacaactgctcttggatctgggtgcagatttggttggtccaggtccctgccttctcgtgagcccggaagccaagagggaggcagaagccctcaccactgtctgtcaggatgctgtgtggtgtctcagctttgctcgggtctaggtgttgtagcaaggtgcggtatcagggtgtggcgtcaacccctggaccccagtcagtgcctgaggctgctccatcaatttccattcctctgttctatgctccctggggtccagggtgagggaccatttcacagctgagcccggagcgggctccccaagcagtccttcatttcttccacctaccaataccagaatcaaactgttctatgcttgagatactggcatgggagatgaggtattttcttctttctcttcccctccaagggtccttggccagcacctgagcgccatgggggaggggcttagtgtgggaacaagtgtttacactaatgaagagcagttggtctgagaagacgcagatgagagaaatgactttgtgtttcgttgggatggtgtgatggcttgtatacacttggcccagggagtggtactattaggaggtgtggcctgttggagtaggtgtgtcactgtgggtgtggctttaagaccctaatcctagctgcctggaagcttaagtattctgctagcagccttcacatgaagatgtagaactctcagctcctcctgcaccatgcttgcctggaagctgccacgctcccaccttgatgataacgaactgagccacgaaaactgtaagtcagccccaattaaatgttgtccttataagagttgccttggtcatggtgtctgttcacaaaagcaaaaccctaagacaggtggctatccctcctccccattgcacgttcctgtggctg

SEQ ID NO: 2171 - DNA, 1574 bp, Mus musculus
tccccgcgcgcgctctggctctgcagtaaccgcgggcctctctccgaggaccttagcttgctgttgcgagcggccacctcccctgcccactctcggagcccgctcgactctcgtagcggatcagggacgcgttcactggttccggcagtgtcctcgcggcggccatggccacgaagatcgacaaggaggcgtgtcgcgcggcgtacaacttagtgcgggacgacggctcggcggtcatctgggtgactttcagatacgacggcgccaccattgtccccggcgatcagggagcagattaccagcacttcatccagcagtgcacagatgatgtccggctgttcgcctttgtgcgcttcaccaccggcgacgccatgagcaaaagatccaagtttgccctcatcacatggatcggggaggacgtgagtggactgcagcgtgccaagacggggaccgacaagacgctggtgaaggaggtggtccagaattttgcaaaggaatttgtgatcagcgaccggaaggagctagaggaagacttcatcaggagcgagctgaagaaggctgggggggccaactacgacgctcagtcagagtagctacagccccacagcccagagccatctgcctgctccgccaaggaggagactgccgcctcacgtcaccagcccaccagggaggagaagccatgagaggcaccagcgccaccagtgtgtccaaccctccccttccctctccccccttttgttttaaagaagtcattttggtgccagggtcatgcataccatctgatcccagaagcctctctgtcactggccctggacctggcatttacccctgccgtcaccgtggcctgcctggtctaagctaccctggccttgagttgctgaggcctggtcaggtgccaccccagcttgacctggctgtttcctgctagccctacgccggccaccaataccaggagctgtgcacaccttacagccttcatgagctcccatgcgcgcgcatgctcctcagagcccatagatgtggccccaggcctcacccctgtcctgttcagagtggccttgagctgtccctctggtagacactgcttggcagtaacaggtttaggtctggcgtggaccgagtgtgaagtgacaaatttgccttaaatcttgcctggcagtggctctgccacgtggtctaaactacccttttggcgaagcctttctgaagcctgagaggtctgagtctggctggggggggggggggggggagttcagggtcaacctcagggcctccagggtgacaaggatggaaaggtcccctgcaaacagggaggctggcataggcctcagggcacctggaaggcagcaacggttggaatcttagtctgcaaattccaaagatggctttgtttgcttttgaagacagctgaggcgggcttggctcctcgagagcactcgaagatggttctttccctccctcctcgctcttattactctggggaaggatgctgcaccgggctgggctgtgaggaccatctctggcattccgacagtttacagaagtaaatgtgtttttcaagaaaaatgagt

SEQ ID NO: 2172 - protein, 173 aa, Mus musculus
MDRGGREWTAACQDGDRQDAGEGGGPEFCKGICDQRPEGRRLHQERAEEGWGGQLRRSVRVATAPQPRAICLLRQGGDCRLTSPAHQGGEAMRGTSATSVSNPPLPSPPFCFKEVILVPGSCIPSDPRSLSVTGPGPGIYPCRHRGLPGLSYPGLELLRPGQVPPQLDLAVSC

SEQ ID NO: 2173 - DNA, 72478 bp, Homo sapiens
  misc_feature (1)...(72478): n = A, C, G or T/U
tctcgaactcctgacctcataatctgcatgcctcggcctcccaaagtgctgggatgacaggcgcgagctgctgtgcccagccaggaagacatttctattattagttttacataatgtggttactatataacatatatgatatggaatatggttactattactaatatatgttataattatataattttttttttggatggaggtttgcttttgttgcccaggctggagtgcaatggcgcgatcttggctcactgcaacctctgcctcctgggttcgagcgattctcccgcctcagcctcccaagtagctgagattacagatgtgtgccaccacacctggctaatttttgtatttttagtagagacagggttttatcatgttggtcaggctgttctcgaactcccgacttcaagtgatccacccgcctcagcctcccaaagtgctgggattacaggtgtgagccactgcacctgggtgacagagtgagaatctgtttcaaaaaaaaaaaggaaaaaaagtcttcctccccctctggacaatcctgtcttctttgcaggctcctttccccataaatgctggtgttccctgaagctctgccccagaccttcttcttccacctaagcatcctccatgggccaactcacacaccctcgtggcctaatcaccaccgagagccctgtggctcccagaaccatatctccaagccaggctctgtcctgagtctcagacccgtctggctgctggacgtctccactgtcatgtcctaccagcagctcaaatgcagtgaccccaagcatgatgcagcactgccaccccatcaacctcccacctggatgctcagcccaaaacctgggagctttctgtgattctctttttttagttcaaaaatataattttgggactagtattttgctgagcttaaaaaatatataagactttggccaggcgtggtggctcacccctgtaatcccaacattttgggaggctgaggcgggtggatcacttgaggtcaggagtttgagactagcctggccaacatggcaaaacccagtttctactaaaaacacaaaaattggctgggcctggtggcttacacctataatcccaggaccttgggaggccaaggcaggcgaatcaccagaggtcgggagttcgtgaccagcctggccaagatggcgaaactccgtctctactaaaaatacaaaaattagccgggcctggtggtgtgcacctgtaatcccagccactagggaaggtgaggcgggagaatcgcttgaaccagggaggtggaggtttcagtgagccaagatggcgccactgtactccagctgggcgacagagtgagactctgtctcaataaataaataaataaataataaaacataaataataaaaatacaaaaattaactgggtatggtgttgcacacctgtaatcccaacttcttggaaggcagtagaatcgcttgagcccaggatcggagactgtagtgagctgagatcacgccactgcactctctctcaaatatatatatatatgtatgtatgtatgcatatatatatatgacttttaagtgtacaattcagtgatttttagtgcaaccaaattcacaaagttgtgcagccatcatcactattgaatttgaaaacattttcttcaacccctgaaggaaaccccacactcactagcagccactccccattcttcctcccccgaccctgcagccaccaatcggcattctgtctccatagatttgcttattctggactttacatataaatggaatcatacgatgtgtggtctttcgtgactggcttctttgacttagcataatgtttttgaggttcgtacatgtcgtagaatgaatcaatacttaactccttcgtatggctgaataatatcctattatacagataaaccacttttgtctatccattcatcagctgacagatatttaggtttccactttctggccattatgaataatgctgctatgaacatgcacatacaagttttcatgcggacatatgttttcctgtctcttgggtatattcctgggagtggaattcttgggccacataataactctatgtttcacattttgagaaactggcaaattgttttccaaagcagttgcaccattttccatttccaaaagcactgtgtgagagttccagcgtcttcacatcctcaccaatactggttattgtctgtctgtcttctggtgtgaagtggtatctcttgtgctttttttttgagatggagtcttgctctgctgcccaggctggagtgcagtggctcactgcaacgtctgccttctgggttccagtgattctcttgcctcagcctcccaagtagctgggatttcaggcacccaccaccacacctggctaattttttttattttagtagagacgaggtttctctatgttggtcatgctggtctggaactcctgacctcaagtgatccaccggcctcggcctcccaaagtgctgggattacaggcgtgagccactgctctcggcctccttgtgcttttgatttgcatttccctaatgaccaatgacactgaacatctttccatatgcttagtggccatttgtaaaacttccttggagaaatctttcttcaaattctttgtctatttttaaattgggctatttgcctttttattgttgagttgtaaaaggtttttgtttttaatattctggatactaggcccttatcagatatgattttgcccgtactttcttcttttctgtgtattgtcttttcactttcttaatggtgccctttgaatcacaaaaagtttttgttttggctgggtgcagtggctcatgtctgtaatcccaggactttgggaggccgaggtgggtggatcacctgaggtcaggagttcaagaccagcctgaccaacatggtgaaaccccgtctctactaaaaatacaaaaacttagctgggcgtggtggcaggcgcctgtaatcccagctactcgggaggctgaggtgggagaatctcttgaacctgggaggcagaagttgcagtgagccgagagcaagccattgcactctagcctgggtgacaagaacaaaaaactccatctcaaaaaaaaaaaaaaagaaaagaaaaaagaaaaacaatttagttttgatgaagtccaatttatccagttttttttaatcactcctgctttttgtgccacagctaagaaatctttgcttaatctaatatgacaaagatttatgcctatcttttcatctaagggtaactcttatgtttacgtctgtgatccactttgagttaatttttgtatatggtgtgaggtaagtgtccaactccattcttttgcatgtgctatcaagttgtctcatcactgtttattgaaagactgttctttttccattgaactgtcttggtacacttgtcaaaaatcaattgaccaggccgggcacggtggctcatgcttataatcccaggactttggcaggccaagatgggtggatcaccagaggtcaggagcttgagaccagcctggccaacatggtgaaaccccatctctactaaaaatacaaaaattagcgggacatagtggcggctactcaggaggcagaggcacgagaattgcttgaacccaaggggaggaggctgcagtgagccgagattgcactgcttcactccagcctgggagaaagagtgagactttctaaaaaaaaaaaaaaattggccataaatgtaagagtgtatttctggactctcagttctattccattgatttctatgcctgtgcttttgtccataccaccttccttggctctgcactccctgtcgctctgcatccttccattcaacaacaagttgtgtgtctgtctgggactggtgctgtgccgggaactggcattcaatgatgagcaagatgaacgttattcctgccctcatagacctgatgttctaggagtggatagacaatgttcgagtaaagggataaatgaaaaaggtaatttcagatagtgattagtgagtactacggaaaacaaaaaatggttatgggatagtggctggaggagggttacagagggggacttttaaactttgggatgctggggaaagcccctctgagggagggggtaacatttgaggtcagaatgagaagttagccattcagattttgggatggggtgtgccaagcagaggggtagaatttgcttgaaggtgaaactgatacacaaaggagggcaaagtagagacatgcagagctacagagccaggagtaaaccatgcctgaattccaccttcatctggactcttgtcagcaggtctttactttttttttttccattgttcaagcccatttgaattgagttttctgttgctgacaaccaacagtgtccacagtgaagtaaatgcttgtcacccataatagactttaagccctgagaggactgggagatattagtctagttcacatttgcacacaaatagctcttgtgtgcatttttatcaccaaaatgtaggaataagagatttcacagagacatccagattttttgctttgctgaaacaaccagaagcttggcattgtgcatagcaactatggcagagctgagaaccagtgactctctttggatgaggaagctgctctgagcatgaaactttcacctggaggaagacagaacagagaggatcaccttttccagaacaaattttcttacatggtctgtgcttggttcatttacattccatgcctgccccctacaggcaagtaagtttgtgaccccgccttggacacgaaataggctcagtgccaggaaagaatgaatgaatggatggattaatttatagcaattcccaattcctttttttttttttttttgagacagagtcttgctctgtcgcccaggctggagtgcagtggcctgatcatagctcactgaagccttgatcttttttggttcaagcaattttcccacctcagcctctcgcgagttgggattacaggcacctgccaccattcctgactagcttttatttttatttttatttttatttagagacagggttttgccatgttgaccagcctggtctccaaattttcggctgaagcaacccttctgcttcggccttcccaattgttgggattactgcgcctggcctacttccccagttcttaacacagtgcatagcacatagttaagtgtcaaatactttgatttctcttaaagaaacatgaattgaattagattgttttatatcacatggattgcaatttaaacaaatatttacacagaatatttatttctgatatgaggtttatttttctcctttagctgggcaaatggacagcaaggtgctcaaaatcagggttctctttcaaaccaatcccttacactttcggtccagtagagggcgatcgcaacaatgactagaaagagaacagcaatgaaaggaggactgaagtggggcttcccagttccctacacattcataggattcctccaggaacgctgaaccatggagactgaggattgaattcagtatggcagccacgtttctgggtggtagtttagcattctgaacagataatacattcacgtggtcgagaactaaactaaaataagaaggtatgtagtaacacccaccaccctcctaccccaatccctaaccctttttgcctgactttctgcttcacctccaccacaggtactgttagttttctcttgtgttctctaccagaagtttcaatgccaatgccaatataaacaaatgcaggctgggcgtggtggctcacgcctgtaatcccagcactttgagaggccaaggcgggcggatcacctgagatgaggagttcgacaccagcctgaccaacgtggtgaaaccctgtctctattaaaaatacaaaaattagccgggcgtggtgacgtgcactgtagtcccagttactcaggaggctgaagcaggagaatcacttgaacccgcgaggcagagattgcagtgagccgagatcgcgccactgcactccagcctgagtgacagagcgagactccctctgaaaaaaacaaaacaaatacaatattaacacccaccccattttacccaaaaggtagtgttgttctgaacacactattcagtagctagctttgcgtattcatgatctatcttgtagaatgttccataccagcatctagagagggtcctcatcctttctttcttttacagcttcatagtcgtgcatggttcaccagcgttattacctattcatctatcccctcactgatgggaactcaggttagccctcaccttctgccttaaaagtaaagctcaatgaataaccctggatatattttgcacacatacaagtgtatctattatctatagcagtgactttcagccccagccgaacgtaagcatcactcagggggctttacaaaaatccccatacgggtggcacacaactctaatcccagcactttggaaggccaaggcgggcagatcacttgagctcaggagttccagaccagcctgggcaacatggcaaaaacctgtctctacaaaaaaatacaaaaattagccaggcgtggtggcacgtgcctgtagtctcagctacttgagtggctgaggtgggaggatcgcttgagcctgggaggtcaaggctgcagtgtgctgagattgcaccactgtactccagcctgggtgacagagttttttgaggcaggcaagaccctgcctttaaaaaaaaaaaaaaaatgccgagtgcggtgtctcatgcctgtaatctcagcactttgggaggccgaggcgggcagatcacgaggtcaggagttcaagaccagcctgccaaccccatctctactaaaaatacaaacattagccaggcgtggtggtacgcacctgtaaccccagctactcgggatgcagaggttgcagtaagccgagatcacgccattgcactccagcctgggcaacagagtgagattccttctcaaaaaaaaaaaaaaaatctccatacccagggcatatctcagaccaattatatcagaatgtctgggtgtgggatcaggggaccttggtgattcccatgtccagccacggctgggcaccactgaccctatagggtaaatggattgatcaagggcacacagacttgtaaatttgctagacattgccaactggcctctacggcggctccatgggggttgtgtcaattcacactcccaccagcaatgtacaagaggacctgggtcttccacagcctccccagcaaagtaggcttgtcaaagttttttatttttaccaaactgctagtttatttatttattttttaaaggtatctcaattttgctttaatttgcatttctcttactaggagttgaggttgagcatctttttgcatgtttaagatcatttaatctgtctggtcatattctgtgcccattgttcttttcattttcttttttttaagtttgacttctctatattttagcaagactaattctttacttgagttgcaaacactttttactgctttgtctttttatgtttacactttgcatgaggtggtatggtatgtttttttttttttttcctggatcactttttatgtgtttgaatgtattcatcttttcaatggcttttggatttggatttgggtaacatggtttatggttagaaggaagctccccatattttcttctggcacttttgtgatttccttctttttgagacagagtctcgctttatcgctcaagctcgagtgcaatggtgcgatctcagctcactgcaacctctgccccccgccccgggttcaagcgattctcctgcctcagcctcccaagtagctgggattacagtcgtctgccaccacgcctggctaatttttgtatttttagtagagatgggctttccccctgttatccaggctggtctcgaactcctgagcttatgagatcctcccacttcagcctcccaaaatgctgggattacaggagtgatccactgcgactggtctgatttcctttatttgtgtttaaatttttgatccttttggaattttccctgatcaaaggatccacctttgttcttctttctaatggccaattgtcccattacccttgtcaaggagtaaggtaggaatggctttgtggggtatgaaatgtgaatttctttttgtcttatttataacagcatctgcctctactcttctgaaactgtgttcctgtccacccacccattcaactacccattgattgactgattgattgattcattcaatttctcgtttttgtttttttgcttgttgagaattctaacattaattggacattgtccctgaccttttgggtttctatttaggatttgtttttatcacttaataaccaacaatgatgacattttatcgaatgtctagtatatttgttccaagtatcatttcaattacacttaaaacaaagcagtgatgtcagttatactatttttcccatttgaggagtcatttaaaagaggttttgaggctttccaatggcccccagttggaaagtggcagtactggatgcaattcaagagcccagtcttcaggatcctgcctttttacctacctggacgctgtaactggtctctgtggaatggctggatgagggaatgaatgaatgagtcagtgaaggaatgaggaagacagaatgagtcagctcgtgctttcagaggagcccaaagggagaggttaagataggaatgcaaatgaccagaatccagagtaaacgcgagcccaccagcgttttggaagcagtccactttctaccccctcctatttaaaatgcttcattctttccagttcctccccacctagaatccatggaaccaaacgctggggtagggacagtggccagcctgtctccttgggtttgacgcattacatcatccacgtggaggtcccctgtggagctctgcagccctgcagcctcaggggcaggggggtggggagaatgaggaagggggagagggggaataggaggagggagtaggggacagggagggaggagatgccaggagggtaagtggagaagagggaggcgaagccgggggcagcaggggagggggtcaaggaggaggaaagaggagagcttggggagaaggaaatagggaggatggagaagttttgggctgggataggcaagaagagggaggaggagagaggaagaagaataaagggggaaggcagaaagagggggaggggagggagggggaagaggtcagggaagtgggggacgcaagcagtgggggaagaagaggaaggaggagggagaggaggaaggcggggtgggaaagggggagggggtagtgggagtttccagggagggggggggaggggaggaggggaagtgagaaggagaaggagagagaagagggatgttgggggggannnnnnnnnnnnnnnnnnnntgtgttctctttttgcctctctttccgctctctccctcgttccccttctctcttcttttttccttcccttccctctcttcccttctcttcccctgtgtttcttctctttctctttcctctccctcttctcgctccttcttctctgcctcttcctcctttctcctcttcttctcgtttttttttccgatttcttccttttctcctcttcttttttgttttggtctttcttctctctgtgccttcttctttcctctctttctttctctttcgtgggtattttacttttctcttcttctttccaattaatgttgtcgttttttttctgcagtctctccccttcgaccatattttccttatattaatatgttaattatttcctaagtcaccttaacgtccaccccctcactctcttgatttttttcaatctttcctgttcttgttgatttgctctgccatagttttcaattactctcacagccacactcttgcaagcgcccggactggtcgctatgaagagtcgggcccatcactgcctggtcgtccaaatgggcttcggtgtgtctgtgtgtcggtccacaggcctggggtccccgcgcgctctccgtccgcagtggaagccgccgccgcgctcgcagcttgcaggcaccgcgtagccgtcgccaccgccgccagcccgtgcgccctcggcgcgtacccgccgcgctcccatccccgccgccggccaggggcgcgctcggccgccccggacagtgtcccgctgcggctccgcggcgatggccaccaagatcgacaaagaggcttgccgggcggcgtacaacctggtgcgcgacgacggctcggccgtcatctggtaggaacttttcattcgtctccacgccccgctccccgggctcgcgcggggcctcgtgcaccgagccggcctccaggcgggacggattcgggcctcccgcgctgtcttcctcgccttattccgggacggcgtgccaggcccccgcgggcttctccgtggccagcgcgtctgttagattgtcctctgcaagcgccgcgtcgcgcggccaccagcgctgatgtgtgtgtgtgtttttttcttctcccaacccaaagggtgacttttaaatatgacggctccaccatcgtccccggcgagcagggagcggagtaccagcacttcatccagcagtgcacaggtagggaggcgcgcctgccgggcggatgcgcggtcgttgggaggttgtctgcacccggggagccccggccagagcgaacccgggaggaaccggtggccacatggggtgcccctggcgcatggcgtgggaggaacccggtgtgagcgttttaaggcctcataaaaccttctcccctctggacatccgaagcaacagaagtgacccacctgcctccgccatcctacaatgccttctccaggcggggcagctcttttgccccctgcggtccactggttttctaaggtcaactcctgtgtttccaaactccagtgtccagctcttcccactgtcccctttgatcagtcactgagcccaaatacgaacaggctagggggctgcttggaagggaaagaaactcagccgcgccctcctttctcccgctatcattgtctgcccgtgtgctgattttatgtgatttttaatttgacgagtagaatcagatgcaaaagagtacacaccatatgattccatttagaaatcctagacaaggcgaaactaatctatggtgtgaatgtcagaatcgagattagcttttgaggctagatagccactgatggggaggggcacaccacccggactgctgggagctgaaaatgtctctgtagacatttgttgatctgggagggggttatgcaggtgtgtacccgcgtgaaaaatcatcagactgtatacttaagatttgtgtgccttaggcacttccctgtggcttgtgaaccatgaaaagaaagaccacgtggcaggcatcgccataaacccttcggtagtggcagaggctctgtgatgttggtaatgggaccttttaaagagattggagaatgcgactccctcccatctctggtctttagttggaagcaagctttcggacaacggcagcacagcccggaggttagggcgtggaccctgagccagacggtgtgggttacttatttatttatttatttatttatttatttttgagacagaatcttcctcttttgcccaggctggagtgcagtggtacaatctcagctaactgcaacctccgtctcccgggttcaagagattctcctgcctcagcctcctgagtagctgggattacaggcgcccacgaccacgcctggctaattttttgtaattttagtagagatgggggtttcaccattttggccaggctggtctctaacttctgaccttaggtgatctgcccaccttggcctctcaaagtgctgggattacaggcgtgagccactgcgcccggccgacggtgtgggttcgaatccctgaacggctgcttcctggctgtgtggtttggaacgagttccttaatctctgggggtcttggtttcctcacctgcactctcacagtgctgttgcgaggataagtgagtcagtatgtataaaatgctcagaacagtgcctgtacaagctacatgattgtttgcgaaataaataaaaagtacaaaattgtgccagggatcatgtgggtgtttctttccttaactgcttccataatcaaattatattttgcatttagttcaattcaaagggtatttgtggtgtgactactagaggatgggtgatactgagaacccgcgtgcacacacacacacacacacacacacacaaaactaaaattactccttgagcgctgcctgtagacattcattcattgcttttgtaaacagttggcctaaaatcgcagcataaagcactgcaacgatgtggagagttggcagggcaggatttgaacccaggcctccgtccctccgcctctgtagttgaatgcttttgcaagtggagtaagtgcaaactcttaactttctcccctccggtccgtgaacagccaggagagtcagcagtatttctgctttgccggctctgaggctatgctttacagaccagcttccctccctaaattcagcttctttcctcccgctggtcacccatccctcccttcccccatcaaaccatgttctgcctctgaagctactgttctctccagcaagtagaaggggatgaggaaaagagcatccatcccatcaggaggctcctggcaggtgctcccaggcctcagcccactctggtgtagtgggagaacacttccctcctcccacaggcttgtggttttctgctcagacccacctcctgccccccagggatgggagtggggagtggcgcgtgtctggcgaggaagctaaaaatgcttccctgctgtgtgtggatcctcatgaatgggccatgggagcttcagctgcagtgctttctttccccagccatctgttggacaaatgcataggagaattatggttgccgtgtctgctcttgttcctctcggaaacgcttgttccttcctgtcgtcgtgtcctcataacccagggacaatggactcaacactggcactggctggatagcagtcaccacgctcgacgtgccttatcttggtcatacctcagaacagcctggtgtggcaggtactaaggttactcctattctacagatgaggaaacggaggcccagagaggttaataggcttcctgcattcacccagctagaaagtggcagagttgggacttgaacccaggcaggctggctcggggcaggtgctcttggcttctgaggaggttgtttagattctcacctctcgtgggattgcttgcaggttgcaaatgacatggttgcccacttgtgactcagagagggctcttttgtggccccagttccctgccaggtatcctgacaggcctgagaagaaaggttccactctggttcgggcttcctgcttccaaacatctcacaaggtggccagcagacttggaaggccagaaacagcacccagtttcttccttataacctcagggtgtgggccttcctggggtcctgctcttctcccaaccctccccactctggcactcaggcattctctctgaaacacccccttccctggccctcccacctcaggctactgtcccttctccccttcctcccccacggctttccagaatgggatctctccacccagcctcccctcctcatttcttcccagcctcctggcctggcctttcctccctcagagctgttttccagagggccacgaggtgtctgtgctgccaggccagttccctcccacccccgcactcatcctcccaatctttctgcctgctctgggtctgcgctgcttcttcccgagcttgcctggctcccggccttcctcgctgcctgcccctccgctacctccgctcttgcttcttgctccatagctcagttcgcctgggatggtcagagaccttgcgagggcggtgagaaatgcccagtgcagattaatgtaagcagaaaatccactgtggcctctagcctggaaactccaggggaagtcctagcagcagcaaagactgcccgaactccaaacagcctctcctcctcctcctagctctgtcttcatccttcacctccattcttgcggggaggggggaggtttagcccctgggcagagccatcttggtggaaagacggagcaagcctctttgccagtgattttgggggtccctggactgtctttggccctgaggtcatgtgcccatccctagaccaatcatggagactctgcgtggccaggcctggatcacatgcccacctctggagtgggtggggggcggggcagccccactcaaaccaggagactgacttgaggaggtggcttcctagggaagaatggcatgccactttcacaaaagtgtccatttgccccttaacatctctgctttcctcttcatagcaacagtctatttgcccttaatcttccttgtctggtatccactctgtcctcccttgctggggtaattctttctacagtacatttctaatcaagtcactcctctgctcattaaccttctatggctcccttctgccccattggattacactcatgctgtctgcttggctttctagtcggtttgtccccacccatatctcctctctagtagctccacacaccctccctcacacacctgcagcccaacactgtaacatttcccgtcttggtgcttttgattttggaggtttctaccatgcggtattcctcttccccatctcaactcatttaggactcagccacccacctagcttagtgtgattccttcttcatttcaactctgagtacactttggaatcagaaacactctagtccgggcgccgtggctcatgcctgtaatcccggcactttgggaggccaaggcaggtggatcacttgaggtcaggagttcgagaccagcctggccaacacagtgaaaccctgtctctactaaaaatacaaaaattagccaggcatggtggccggcgcctataatcccagctactcggagactgaggcgggagaatcacttgaacccaggaggcagaggttgcagtgagccgagatcgcgctgttgtactctagcctgggcagcagagtgagactctatctcaaaaaaaaaaaaagaaagaaagaaagaaagaaagagtcattctagattgacatctccgctctgcttctcactcattgtgtgtgtggccttgggcaagtgcctccctccctctgtgcctcagtttttaggtctgtaaaatgggaatcctgacatgcctacctctgagggtgactgggagggttcactgaagtaatgcacctaaaatgagagcacaggccacggtgtgtgttggctacccctaccactgcttttcttttttttgagacaaagtttttctctgtcgcccaggctggagtgcagcctctgcctcccggggtcaagagattctcctgcctcagcctcccaagtagctgggactacaggcatgtgccaccacacacggcaagtttttgtatttttagtagagacggggtttcaccatgttggccaggctggtctcaaactcctgacctcaggtgatccacctgcctcagcctcccaaaatgctgggattacaggcgtgagccaccgcgcccggcctcaaataattatttttactctgatagcactcgtagaggcattatgctttccactcggaagctttcagtacacgtccccactcagcacaaagtaggcacctggcccaggctggtatgcaataggcatttggccccatgtggacacgcattagacccttggcccgggtctgcatgaaggagcatgatgagaggtgcttagctcagtagttcaaggtttgggttttgtccgattgcctgggttcaaatacctgccattcatgtgctctggagcaggtgagttacccatctggtaacctgctacagtgtggtcattaggaggattaaggaagcaagtccttatgctgcgtgggacatagtgagcactccataaatgtcaattactgcgattgccatttttgtttttggaattcaagtgatgtggaagtagcgttcaagagcaccaagaagatggaagggggagagatgatgggaaggaaatgggtgctgagctgggctggagggtcacaggttcacctgacagagccactgggagcctggagcaatcagggctcagctggcagaggtggagggaaaggggccatttgccagaccggttgtatgatctacctggccacagcagaaagggcttacagatcacgtatgtgtggcgaggcagtggctggggctgtctgtgaaatcacattttgtttctgcaccattcagataatacatattctctgtggcatactcataaagcaagactaaaccaaaagaagagaataccaagtagatatagttcagatatagttttgcaaacactcaggaacttgttccttcctgtgtttattccttcattctcctgtttattcatttaattcattcgacatatgggactgctactctgtggggcacgactgtaggcactgaggataaatatagaagcagaaaaggcgcctgtcctcgtggagctgacattttattgtcatctcccaggacagaccgctggtctcatttttatctatattcttgaaatagttttctgtatgtaattctactacaaaaggggatcatagatattttagagccacctcccacaacaactgtaatgccaaagtttcttccctatcttcccctcttcttctgcaataccagtttaaaaatggctacgtagtttctctcatacaaatgtgacattgttaaagcaatcctctatccatggacctcaaattatgtgttgcaagcagttttattttagaaggaatccaggcatctgggaatgagtccagttttctgttggtgcagattttagagctgattggttaagagcatcagtggtgaggctggggcgtcttgctttgaacgatagccttgctgtgctgtgtgaccttgggcagatctcccagggtctgtgttttctcgtctgtaaaggtggggataatgattgcatgtaggttgctgtaaggataaactggcttgttccatataatgcttgtagagtactgcctgacacagagtaaagctcaataaatgtggttattgttaaagtagcaccttcagaaggtgttacatatcaatggataggttgaaataaatttgagatgtggggtggttaccagaaaaggcttcttcatgaagggcagcatcatgaagatgcttggttggaggcaggtgccctgtgacatttgttggatgatggtctgggtggagatgatattcccatgaggctctggtcagccagtagtgtttaacccaaaacaccacagagagagatgtagggattgatgtttttttttctgtccagcattccctcctttgggggaacctctcccttccatttcataataatcctggtcaaccaatgtagttcctgtgagagtgcacataacccagacctgtccaatcagagcaagccactcttctgctaaccgattggttcaagggcccttgtgactcaaatctagccaatcagattcatccctgagactttggacagagttgttggtaaagagtctttttatctttctctgggattaaaacaaataagaataatgagggcttggagctcacagggcatgtctaccatttatagagagtacctgtctgagaactcaggaacagagcctggtggtgggagtggagacaggtgacgtgccagaaaactctgggatccagccatgcctgaagctttctctttagacggttcactttcatgagccaagtaatattttttctcaggccagtgtgagtgggttctggatttagtttccatctaaaagagtcctggccatagtctccaggttaggcagctggacacagtctcagaggagaggagaatccaggctggacaaggaatttaaagcctctcatgtgagaactgactgaggaaattgggcatatttaaccttgtgagaccaagaggagagatccttgggagataccagtgttgtcttcagatgtttgaggggctgtcatgtggtaagtgtggacttcttgtgttcctacccccacaccaaccctatgtggtaaatgggaccacgcagtaggaattcagggatagtgtgttagtctcttctcacgctgctatgaagaaatacccgtgactgggtaatttgtaaagaaaagaggtttaattggctcacagttttgcatggctggggaggcctcaggaaacttacaatcatggcaaaaggggaagcaaacacatccttctttacgtggcagcaggagacagactgagagccaagtgaagggggaagccccttataaaaccatcagttttgtgagaactatcaccaaaacagtatgggggaaactgcccccctgagtcaattatctccaccccgtcctgcccttgacacttattacaattcaaggtgagatttgggtggggacccagagccaaaccatatcagatagattttgggttgacctggagaggaagaggcccttaaggtagaacgggctaccagaggagaaagtgaggcccccatcacaggaggtatgtcaggagagtccgactaaccacttggcatagatgttgaagaaaggattgaaggaggccttccttgcctctgcactctcctgtctcacagccccattttctggcctgctatgcctccaggaagactgactggccttagtgcaggcctaggggatgcctcttggaggtggcatcagccctacctggatgacagagactgagagtggcagagaggtggttcctacggaaaactggagtatagcgaccaaaagaagggagctggaatgcgaaggagtcaaattcacttgctgtccatgacctctgcgtatatggcaatacaacacacagagagccggcagtctatttatcgtgctgttttgcacctgaatattttttccctagctgaacatacacacccgggtttcagaaatttgggcgagaagggaaggagagaaattgctttctttcctaaggtctaagggaatgtgacatcaaaaagaagctccaaatctgtgacagggctttgggcagttataaagtgctgaacagtctgtccgttaatgcacgcgacaaacattttattgggttcctactttgctccagaaacaatgttgggtttttaatttaatttaatttttgagacaaggtcgtgccctgtcacccagtctggagtgcagtggcacgatcttggctcactgcaacctctgcctcccagctcaggcgattctcctacctcagcgtctccagtagcagggactacaggcgcctgctaccacgcctggctcatttttgtatcttttgtagagacagggtttcactatgttgtccaggcaggtctcgaactcctgggctcaagcgatccacttgccttggcctctcaaagtgttggaattacaggcgtgagccaccccgcccggctgggtttttgtttttaagtggtaccctgaagggctgcgaaaacattacctttgtaattttctgcactatccagtctcccattgccttctttgcccacagatctgttgctgggaggccctgagccacgctgcatagcttttttgtgtgtccacaggggcgtgggctttgtggtagctctttcagtctactgcatggtgatgtttgtgctttcttttctgtttgtggctgtgtcaccacaaacagaaaatgatgaaggatgatagatgtgtatcttcctggtaagtacagtgtctcaagttcaaaaaaagcattccctaaacactagttgaattgggtttttgtcccttgaaaatattcagaagttaatgcaaactttttgaaagcatcccttacagattttataggtgttataaatacctccttgtctcccatcctttctttaccccatttcattctggtgcccacccacacccagagcatggagctctatgtctaggtctttggtaaatattccagttgccagatttagtggtcatttctttgtctctgatccactttacctccctccagcatttgccagtggccagcacctcctgaaaagatagtccccctcgcttgtgcttctgcttctgcgtggctagacttgcctagttctccttttatgtctctctcctgtcattctcacttccttctgctgctgcttctgcttcctgcccgataagtctaggcgtttcttagggctccacccttgatcatgaccttgtcttctccgggacatttctcgagcatctactatgccccaagccctttgccaagtactgagttgagtcctttccctgaccccagtgagcttgcagtccaggctaggggtggctttctaaccttcaggtcaggttgctcccccgcctcccacttccaacaccttttctccataaggtccaaacgctcagacatgacatggggtgccctttatgacaggtgctggccagccgacccctccagtgtgtgtccccaacacacacgatgctgaccttagggatgcccaagtcccaggccctacgtaggagctctgcgtgtgttagtttatctaatttatcttctctctgagggagtaatgagcagagtgacacccacaagtagaaattatccccacttcactgaggaggaacctgacattttccttggagagccagagtcgcttgctggagatgctgcagttgggaagaactgcactttgaatccagatctgtgtccgaggctctcagctcttcccctgtgccgcgctggcctgccttcccgcttccctaggcctgtggactctcttccctctgcctgcactgtcttcatctgtttcgccttcctggaggactcctacacacccgtcaaggcccggtgtgaatgttccctctgctcggatgccctccttgtctttgtggtgttggtgtcccgtgtggtggtcgtgtgcatgtctgtttcttcaactccttggcgaagtcctcctggagagagggactttgtccctttggtggtggtatccttggcggggaatccccatccttcatggttagatggctgccaatctctttcccccatgggtgtgttgctcccttgagtgggcccaagtcatgggctgaatcctgggtcataggcttttcccagcacgtgctggctgtccactcctttgtctcttgcttatagaagagaacccgtaatgcctgggttcaaatttcagctctacttcttatgggctgtaggcgcctgggacagaatcctacagttactgctgtgggcacctgggacagaatccctcagggaccctaagaggaacatggagggtgcagccctgggaggcgggggcacgtagccaccgactcttatcccccattggttgaggggtcctttaggggctttagggtttctgcactccaggctgtgcctctgtgaggttgagcagctagacgtggcaggatgtcatggtgtacccaagtggctacgcccactaccactgaaaccagacatggccttggagaaggtgacaaggagtcaaaaagcatctccttgcagcatttagcagtgcctaagatcatagccacatgtgcagttatgcacctgtttatcttgtgactttcctgggagcatccaagccccgtggggcaaccaggtcagctttgttctctgcagtattggcagcgctgggaacagtacctggcagcctgcacagatgttgttgagtaggcaaatgagtgacagtccatgtagatgtctgagagctaagctcacacaggagggcccgccgtcccctcctccaaagtaacagcccagtggcccacaaggctcccggccgctaccactggccatgtgactgctctggccccaggcctcttactccagagcccaggcatcgccaccttcctctcccacttaagcaagtgcctgtgacttttctgattcagctcagtggcctcagcagtggcaggtccccagaggctggtttttgaaggcaggcatggcacgtcagcatttaatattttatttcatgagtgcattttgaaattaacctgccatagatcttgtttttagttctgtacttagtttatggtcatcacgcttttcttcatgcacttattcttactttgtcttctaggtacttaggtaagcttccttgcgagcaataaataaataagttgataacaacaatggttaacagtggacctttattaggccaggcattagccagggtcattgtgttactttcctatggccactgtaacaaatgaccacaaacttggtgaattaaaacaacataaatgcatcatcttatagttctgcaagtcaaaagtctgacatgagcctcacaggactaaaatccaggtgtggacagggctgctttctcctggaggctccaggggagaatccattttcttgccttcttgtgcttccagagactgcctgcattctttggcttgtggccacttcctctgtcttcaaagccagtactggcaggtcgagtcctcatgatgccagctctctggttctggccctcttccccacccttccccatttaaggactgcagtgatcacgtgggtgtcacccagataacccaggagaatctcccatctcaggatccttaccttaaccacaccctcaaagcccttttgccatgtgagggacatattcacagttttggggtttaggacatagatgtcttaggggccgttgttttgcctgccgcagtcacttgtgatttcatttaatatgcccagtgacccagcatcgcgggccctgttgttatcccatttcacagccgaggcagtacgcaggccaggctgcaattcttacctggcgtgtgtgcttctcgcccccactcctgacaccccctgcaccccagcttgcaatgtaaaatctttgtgaaacaagaagggaagaccacgggaggctcttctgtggaacaccgtggggcagacctaaggcccaggcccaggccatggggggccgtgggaagtgtttagaggccactgttgtttagaggccatttctgccattgttgttgacacagaaagcctgtgcgtgtgtctggggagcaatgctccttaattcctgaacccgagtgttccctcctgccctggagagactttcccaggaaatcccgatttccctacttttgcctgcagggctcgcctttggaggtctgctctgacccggaagcacttttctccccgtttctggctagaattctacgctgcttataaaatggagtgtattgttcatggcttgcaaataaaagctgctgctgcttcaggcgggccaggggtcagctggagctgggggaggggtgaaaagaacctggcttgagatgcaaagagccaggctcctggcggcccctgtgtgacccctacagccacagccccctctgggcccctgcctaacagagggacagagagagggctgtgtccaccctgcagctctctggatttggccaaacctggctgctgtgtggcccattcttgggaacaccacactctcttcctgggtgactttgatcactcatccccccaacacatataaactgagcactcacggtctgctgggcactcgtgctgggagagctcagtggggtgcatcaccatgcacaaccttgtgaatggaccgaaacccactgaaatgtccactttcacagggtgcagttcatgctgtgtaaatcatatcttaggatgaaaaagcataaagaaaaaaggaggatgaggctcctgggtgggcaggaggacaggaacctagtagggccatggggtgggggccgtgggaggggagcgtgggtggggagtgagggtggagagcagggggtgagggctgtggagggtgagtgtggggtggggagcagggggtggggaccgtggcatgagggctatggccggtgagtgtggatggggagcgcaggggttggggagtagggggtagtgtaggtgggggccatggggtgagggctgtggagcagggagcatgggtggggagtgggaggggagcatgggtgagaaggcggttggggagtatggggttgggccgtggtggggcagcgggagggagaggggagttgcgggggtagtagggagtggggagcatggggtgggggccatcagggagggaggtgggtggggagtggcgggtagaaagtggggggaggtgggtagctggcagggcccagggtgcagtggccccgggagccatgtgaggcctctgggttttcctggagcagtgcgcattttattctgatcacttttgtttcatgtcctcctagaactttgccttggccctttctgtggctcattcccagctgggcagggtcttattctgccacttcttctgggtccccaggcatgatgcgccaaccccacaggccctgagcagcccttttccctgagcacagccctgcctctcccctctgaactcccggctcccccactgcctccattcgcttcatagtctgttgccattgtcaccgttggtcccaaggccgccttgtccttatcatcctcacctagcgcttcccaacacttcctgtgtgccaggcccgattcccagggcatcaccccctcagctggctgatgaggatcaacgtgctgtgtcaccgatgaggagacctccagggggaggcttgctggtcccctgggctctcagtgggtccccctgtgtttacggcagagctgtgacgccgtgttgtacccacggccgggtttcagtgtgttcactcagagcctggcgcagagccctggctgagtcacacttcgttgcctcagtcctttgggaagaggggaggttctgcctcggatgttgcatggggtaatgaataagtgaatccgtagaagagtaaagtgagtcagctgtccccgtgggggctggtgtgcgcaggcttgcgggctggagtgttgttaaagtccacggggaaggaaaactggctgcgagtctgcccccaccaaccaggggctcccaggcagagatggagaggcctccggggaactggggggcagagaggggaagtcgctgggccattgttacatgggaggaaaggggcagagccaggacctgaaccctggtctccaggctctcatgccgctgaggtttcaagccagctgcgtccctctgggctaccgttcttggtgcatgtgaaaggtggagaagcagcttccttgttacgcaggcatcactgactctggcatcgctgactccagcaacactgcctttttgtccttccctttccatgcacttttttttttttttgagatgaagtctctgtcgcccaggctggagtgcagtggcatgatctcagcttactgcaacctctgcctcctggactcaagcaattctcctacgtcagcctcccgagtagctgggattacaggtgtgcaccaccatgaatggctaatttttgtatttttagtagagacagggttttgccgggttggccaggctggtctcgaattcctgagctcaagtgatctgctcgccttggcctcccaaagtgctgggattacaggcatgagccactgcgtctggccacatgtgcttttattaaaccacaaatttgtcaaaacaaatcagttgttatgtctgtccatatccattcgttcctgcctgtctattcattcctgctctctgggggtggaagtcacactttaaaaatcctgacaaagaattggttttattcttttttttttttaattaaaagaaaaaaagttttttgagacagagtctcactgtggcccaggctggagtgcagtggtgcgatcatagttcactgcagcctcaacctcctgggctcaagcaatcctcctgcctcggcctcccaaagtgttgggattacaggtgtgagctgctgtgcccatctgcttggttttactcttataaaatggcacccccccacccccattgaactgaaacgcagctgcaagtttggaactgaaaagcctctgagaagtcaaagatgccatgtagatgcccttcatttattcaggaagtatgtattgagtacatgtggggcatcgtctgggtgctttggatgtgctagggaacgagattccttccctcctggagtagggctgagcaagctgaaggaggcctgtagctcattctgagactttaagctcttagtttgcacacagttatcatcagctgcatcatatgcccttctggcttgtggtgagtcggaaaaagagagaagggctggtggaggaaggcgttttgaacttgccagcagaggctgttgctttgtctggagttctgtcacaatctccctctcaaattgtcaacaagaaccctctttgtccttaccctgttctctggaggaactctgagtcatccttcaagaccctgatcaggatgggtgcggtggcttatgcctgtagtcccagcactttgggaggccaggatggggggatcacgaggtcaagagttcgagaccagcctggccaacatggtgaaacctggtctatattaaaatacaaaaattagctgggtgtggtggagcgtgccagtaatcccagctactcgggaggctgaggcaggagaactgcttgaacccgggaggcggaggttgcatgagccgagattgtgcccctgcactccagcctgggtgacagagcaagactccgtctcggggggataaaagaaaaagaccctaatcaaacatcacctcctctgcaaagccagtcctggtcacagctgcccaggcagagcggatttccttctttccttgatgctcctgtaactgccagtcacaactctttgccatagcagtaatttcatggtattcacacactacatttttgtttgctatggtagactgtatattttttgaaggtagggattgcattttcagcaaaatccctgtatcacagattgtcagtaagtgtttgtcaaataaccaacccacagcgatggaagaggcagcacaacagtgaaaagcagacacaagagtataaagcagtgtgtgccagggctgttcagtgattgggagccagacgctgaacccctcagtggcgcagcgtctccttatagatgctatagatactgtaataaggtcctcagagcctccagggactgcttacagccactcttctctaagtcagagggtggagtcaggtctaacacactaactcccatttaaggaagtagagaattatcatgaaagaaagtgctagtgctttgtcatagggggaaaacctttagctctcggtttaatttcggtatccagatcagcttataccccggaggttctgccgaagtaatcatctttcttttcctctggccatcctgtacttcattttcttatgttctctgtcaagctaggaaagctgggtcattcacacctagtgaaaatgcaatgaatcggggatcatttgaggagtctcctgcgtgggatatcaaaccgcatttacagtgtgagctccaatgcagaaacaatgtgcctacacgcagatacccacacaatgcggatcacataaagaaacagagccttggccgggcgcagtggctcgcgcctgtaatcctggctctttgggagactgaggcgggcagttcacctgaggtcaggggttcgagatcagcctggccaacacggtgaaagcccgtctgtactaaaactacaaaaattagccgagcatggtggcaggcgcctgtaatccctgctattcaggaggctgaggcaggagaatcgcttgaacccaggaggcggaggttgcagtaagctgagatcgtgccacggcactgcaggctggacaacagagcgagatttcgtctcaaaaaaaaaaaaaaaaaaagagcctttattcatgccctataaggaataaaccaaaaggagtttagaaataaacagagtaatgggtttcagtttttacactttttaatacttttgcaaagttttttgagcaggacaggagggtgtttttggtttggttttgtttttgtcaactgcagggagttaggaaagtcactctgaaaaaagacagcaagtggtatagtgatatcaggcctcttagtaatgagagctctcccttcaacttcagcaacgaacctggccccttccagccccagcctcaggccccctccctcttacagacgtgggcggccactgagccctccttcctctttggtggcaagaagacatttctccttccccagccttgccctctctccccttagcagcctgctagaagccagccgctgccatggcgactgcccagctgtccccttgctctgggcagcaggatgtaagaattctttcccatttcctttcatcctcgctccagggagctccctcggtggaagctgacagctcagctttttggtgtgtgggttgttttttcccttcctgagccgtgtttgcataacctctccggagtctctgtaaagttagggcagctttagagtgagctgcaatcttgccgctctctggggcaacttcctcctgtcctccccttccccctttctttggccttgctctaaagttcagtgttgggtggaaattctgaaatgattcttttttctttccattggcccacagataacgtataaggtgcctatgacatgcctggcatggtgatcagtgctggggccataacaagacccagacagatgtgaaagtagctgaaaagatccaaaggacttacgctaaaaagtttctagggtggtgggggatccttaatttcttcattttgcttttttgtgtttctcattattctacacctagtatgtgtttttgtaatgaaaaaaggttgttcaaaacatttgcaaaagtgttaagaaagttacacagtgctcgacccatagcagatcctccttcctcgggggtttggtcctccagccaggactggctttggcgatacgcagaggagactagaatctctttggggaaaaggcagaggcccccagtcaatgtggatcctgggtgggggccgccctggtgagaacactgggtgcctggccagaatctcttcctcagtgctgacctgagcctgagatttcaagtttgggtgggagggggaagggggggaggggcaagccttcagagcttagtggggaccatatgccgtttgtaacttttggggagttattagagcggctcatcctggtggctttggtgattacagataattcttgcctttacccccctccctagcccctttgtggtcatcctctgtttctgttgtcactgggttttctcccacatccccatccctttgactgcccagcagctccagcctgatcacccccgaccccgcttggaccccccctgcttgctcccccccacccctgccgcttggtccccgccgcccccacttggttctcccgcttggtctcctgcttggtctccttgtgtggtccttcccacccccactgtctctcctttaccccctctggcctttccctgccccatccctctctcttccagagaggtcggggttggtgggggggggttgggggggagaaggggaggaggaggcacagatggggaggaggtgggagaggcgtaaaggcacctccaggacccaggggaaaggtcagaggagagccaggagagggaaaggccagagaaaagagcatgtaacagccaccagggccggctgctgagttcacagctctgcgccaggcggtatcctgagaacgttaggatgctgatttgttgacacagatgaacttacttagtaaatgaaggcagagaaccttgaagagatgacctgggcattggactgaggctccctttacctaccttcagggccctgcctggggcttctaggtccccacgggtcctttgcaggagccaaagctccatcattggcttctgatgaggcttcatagaccagtggaaggaagggtccggctcttttgagagtgaagttttattaacgttaaacataacagctgtgtcttttcatgaacaagactctctctgggtgggaaggggagggcatccatagtcttcaaatcagggacatccagcgtgcaattggcctgggctctgagtgcatgacaccgaccagaaggaaaccaccgtcctcaggatggggctcctgaccttgctgtatcctcagtgacggcagccctgagatggggctcagtgtgatgctatgatatgcatctgaatcctcgtggcttatgggcaagcagaggagctagaggcagcacaggcagaaaggcctcctggtacccagggctgatagtcagtagctctcttgctaatgatggctgttccctctcttggggtgtgggattttggggagggagcactggagggactgtcctggtggtctttgatgggcgtgctcaggaaccacggactctgcaggaagctgcttcatgcagtcatttgcttaaaataaaaggcagacaggcagcaaggagggcgtgggggctgaactctgagcacttcagcttttctgtccttgagacctttgtctcgtcccctctcccaacagtgagttctcaccatttcctcttctccacctcttcctctaagtcagtgggtctcaaggtttggcagcctcagaatcaccctggggctcattcgagcacagtttcagagctccactcccagcgtctggatcagtagggctgagtggagcctgagtacccacatttctaataagttcccgggtgctgtggtgctgctggtccgaggaccacactttgagaactgctgctgtggacttcagcagctctgcagcgggcagggaggattgtgtggctcattctcacttcacctctccaagcctcagtttcttcatctgtgaaatgggactgcgatctgtgctgccctcacagaggagaagaatctgcagtgtgcagattcttagagtggggactggcccctcataagtgcttagtagacttggggctcagttacctctcagaccttcactgtcttccatctctcctcaagaaagactcacagaaggagtgactccgtgactgtgtgcctcggagtgcctcactctgaaacccagagctggatgcagaaagtggtccccattctacagctggaacagctgaggctcagagcatgaagcaccctcatctgatgttccatagctagaaggaagccggctgggatgcggcccctgctaggatgcggccctggctgggatgcggccctggctggctgatctctctggagtttgtgctcttctaagtgctccagattgccttagcgaacagttgtgtgtaaggggtgcgaggtgccaggaaatggcgagaaacagagggcagactctgtccaccttgttaaggacagagcagtggagagttgtgagggcaggggctggtgcgtcagtgttctgtggtggtagctgagatctcccagggagagagtgtcaggggaaaggagaggatgaggtggaaccctggggagtgtgtgtgtggagacagagggggtggaagagccggggagaaagtagaaggcgggatcagtgctctgagaaccaagatggcaccatgccctgggtgccgtgggaagggagaggttcaaggagggcagaattgataatggcgtgaaacgccaccagtgggcatggagaagatgctgttggctttggcaattaggaggcccctgtggacccctgagggcagtttcactggagaggtgttgggggtcaaaaatcagcaatgattcccatcagccaacccttcagacctcatttctttttcatgtaatcctcccaaccactttatgaggtaagtatttgacccattttgtggatgaggaaactgaggcttagagacattcaggactctgggctgggtcacaaggctagtacatgtgggggtaagtttctaaaggattctggaatttgaacttgcaccctggacattgcagagaaggttaagggtatagaccactcccctgtgctgagggctccagcagaaggagctcatggcatctgtctctggtacctgtgtttgggtgaagtcctgggtcccccgtcccccactggggttgcccagtctccctgtctcctctgcctagacctggactctcagcttcagtttgaagagatggaccattggccctgttggggaccaagtggcacagtgagggtgatggaaagcccaggtaccaaccttcttctgggcagttttgccgtcttagtgcatacacacacacatatacacatacatgtatatataacacacatacacatacacatacatgtatatatataacacacacatacacatacatgtatatataacacacatacacaaatacatgaatatatatacacacatatatacacctgtactcacaaatgtatgtatatacacacatatacaaacacacctgtacacatatagacacatattatacacataaatatatgtatatatacacatacacaaatatatacgcacacacatatcacactaatatatacatgacagcgtttctctgtgccctttagtagatatgccagtgttcccgcgtacaggagtgacaatagcccgacatagacgagggagcctagggctccccactgctgatgtggggctgtgactgccactggggtttgtggacccaatttgttcagaagagggaaagtaactgaaccagggatgaagaactagcgattccccttccactgcccagtgtgaggtcaaaagggaccgagaacctccttcagggtgagcagggttggggagaggcctccagtctgccgggcagctgcaaaaacggtgcgcagaccaacaggttttccgtctccgactcagctgacccgtcactgtcgtgccagatctctagcagcaaacatttgtaagcataacgtgactcggattttcaaaaacaggcctgtcagcaatcttgttgaccaaaccattgtcggataagcacgcagcagtcacctagcaaaccacgtccctctttaccccgctcccccacgatcatttaaatgacatcaggctgtggttctggaaggttcccagtgtccttggggttgtgggtgtgacttacttattgtacatctatcttgtgccaggccctgggctggtacttgggacacagggacaatgcctgtggttcttcaacaagaatctgtgaccctccgggggcaaagggtgttgcccaaggtagacctggggaggtctgaaagaggggaagggtggatgtggagggttggaggtgcgcagagcatggccggcatgtggaggcacttggcagccagcagagagggcagacgctggaaaagccatggagctccgcagaggagccagccagagccgtgggagggggcgacactgagaagagagagaggctgggagagctggctcagcccgaagccttggccctgggctgaacacatggttgaggtccccaaaaactgcgttggcccaaagcagggctggtaacttacctccatggaggcttgggccagggatgggtagtttggatccaagtccgggctgaccaatgtggaaatgggaacccgagagcggttaccatggaaacacactcaccgtgttcttttgcttgtgaaatgcagtcggaggcggatgttcagcccctcctccccctcaggtcaaggctgccatttaattaagcactttggtgttgatgctctgacgacactcctcaaaacagagccctggcttcccagacaccacggggactgctgagaaatgctctcgagctaaagcgctgctcccccacactccaagtctgcaccagccgcctgtggctgcgcactttgcaccttacaagtgaggaactgccatctcttgcaccagtctcgtttcctgtgcgctgtggccacctggcagccccgccctgtgtcaggagctttaggttggaggttccaccctgatgggctaggtgggttttgtagctttcactttcagtcatcatggtcaactgataagggaggcgtgaaatcaccccattttggaaggatcccaaatgtctatcaactgatgcactgataagcaaaatgtgctctctccatgcaatggagtgctgttcagccataaaaggaatgaagtggtgacccgcacatgcggcagcagggatgatccttggagatgtgacgctgagtgaaagccagaccgcagaggccacatagcatatgagtccatttcaatgaaatgtccagcacaggccaatccatagagacagaaagtggaagagtggctgccagggcctgggggagtggggtggagaatggggagtgactgttcttgaggacgggagttctcgttggagtggtgaaattagatagtagcgatgatggcacaacattgtgagtgtccttaaagccactgaattggatgctttaaagtggttaaaatggccgggcgcggtggctcacgcttgtaatcccagcactttgggaggccgaggtgggcggatcacgaggtcaggagatcaagaccacggtgaaaccccgtctctactaaaaatacaaaaaattagccgggcgtggtggcgggcgcctgtagtcccagctactcggggggctgaggcaggagaatggtgtgaacccggaaggcggagcttgcagtgagcggagatcgcgccactgcactccagcctgggcgacggagcgagactcccttctcaaaaaaaaaaaaagtggttaaaatggtgaattttatgttatgtgacttttatctcaataaagaaaagaacgtgttttacaggtgaggcagcccaggctgatgtttgggaattcaggcacagtccccggggcatgggaggtggggccctcacccctcggggtctcctgtgccctggactcctctgtcctcaccttctcacatccagttggtcaccaggccctgtggattcacctgcgcagtgtccctgagaccatccttccttctatccctgctgcgttgttacctactgacccccagatagccatggcctggtggggcatttccctggagaaagggggctgagcacacacacccaaggtgtccaggcccttggctctggcctcgtgttgagagtctggccacatcacgtggcctctgagcctccagcccttatcaatgaaggtgatttggatgttgatgatgaaagtggccatgacgtctctacctcatctgcctcccagcgttgttacaaagaccaaatgagatgaaatagaagcatgttttgtaaactgaaaagtgctgtgccaatgtgagtggtgatgacgatcagtttcctttaagaagtaagtgttgtggagtccctgaccctggactgcagctaggatcacgcattcatggtctgctgagagctgcgtgttccttagctcccggggacaaatggatgacccgttagaccacccggcttcttgttgaaggcgaacgtgctggttaccccctccggttttgagataatcaccaggaagtgagcttgtcagctgcaggccagtatctcctgtagacaggtggtttgtgtccttgggtcttggtgctaacctacatgcttcgtgcgggactctgcagggacgtacttagattctaggaagaaacgcagattgattttttttttttttttttaactcagtgtgatcctttgaccagtagcatcagcatcactgggaagcttcttagaagcgtagaccccagagctgtttaatcagaagctgcgtttaagatttccccagtgattcaaatccacacaatgtttgagaagcaaacatatcgctctacgatatcattaggtgcctgagaaaccctcacaccagcaactaaacgccctgagagagcatcagtttatgcaagtggctaatacaaggtgaatgactccaaaccagtggcatccctatgtgccagcaaccaccacttaggaattgtaatgagatcttggtgataatggcagttaaaatatgaactgtttgtgaagtaagctgaataaggatatgtgatcccctcaagaggcacagaactttgttggaaaacacaaaaggggtcccaattaaatggggacaccaacggtttacagcagaggttctcaactgggggtgttctgccccctttggaggacatctgcaatgtatggaggcatttttgtttgtcataactggtggggccaggtgaggggtgctgctcagcaccctgcaatttacgggatggttcctaccagagagaatgatctggccccagatgccagttgagctgatgttgaacaattttggtttatcctagtggggtacacatgcacccgcatgcacacgcacacacatgcaatgcacacatacacatgcacgcacatatttttattttattttattttattttattttattttattttattttattttattttattttatttgagacagggtctcagttggccacccaggctggagtacagtggcgtaatctctactcaactgcagtctcaacctcctgggctcaagtgatcctcccaccttagcctccctggtagctgggactacaggtgcctgccaccgtgcccagctaattttttggttttttttttttttttttttttttttttttagagaggtgatttctccatgttgcccaggttggtctcaagctcttgggctgaagtgatcctcccacctttgcctcccaaagtgctgggattacaggggtgagccaccatacctggccaatacacacatcactttaaaaattcaaaaaatcaggctgggcgcggtggctcacgcctgtaatcccagcactttgggaggctgaggcgggtggaatacaaggtcaggagatcaagattcatcctggctaacacagtgaaaccccatctctactaaaaatacaaaaaattagccaggtgtggtggtgggcgcctgtagtcccagctactcgggaggctgaggcaggagaatggtgtgaaccctagaggccaagcttgcagtgagtcgagatcgcgccactgcacttcagcctgggcgacagagcgagactctgtctcaaaaaaaaaaaaaaaaattccagaatatcaaatgatattttgataatacagagcagtggagggtgggggaacttagcatagtggattgtgaaacaaattttaaagtcatgataataaaaacagtgtggcattgaaataaaacttaatgtggatcaatggaacaaaatagccctcaaagccattttaataaaaatgactatataagatagaacaagcataacacagccaatggaaatgtgttcagaattcattgttgacctaattgccctagtcataagtgaaatatcctcggagccatatcccgggccaaattaagagccattttctttgtttcctcttcatacccagcaccccccttgcccctcctgtctctctacagtgtagagtctcattccaaactgcaaagattgaggcaaaaagagttgatgaatttctggtctacaaagaggatgaatttctggtccctaaataagatccataatttgagcctttttaaatttttatttttaaattttttttggctgggccctggcactgctggcggcacccacatctgtgcaatgggcccacccagactttgagccttgattgtaggaaggctgtaggcgttgcagccagaaaggcctgggtttaaatcccagcatgaccttgaattccctcacaaccttgaaagtgccatgtgacttctctgaatctccatttcccatctgtgaaatgggcatgaagcctgcagcactgttgccaggattcaggggagtgtgacaagggcagcggatgagtgcttccctcctgtcctctgcacatggtgctcccagggaactgcaccggtctcctgctgtgctgctccaggcgcactcgtggctcacagcctctccccagggacatgacatgggggtgttttaacgcagcaccatgttctcttttcgcttttggccacagatgacgtccggttgtttgccttcgtgcgcttcaccaccggggatgccatgagcaagaggtccaagtttgccctcatcacgtggatcggtgagaacgtcagcgggctgcagcgcgccaaaaccgggacggacaagaccctggtgaaggaggtcgtacaggtactgagttcctccagagtctggaggtcaaagctcgccaagggtcaccatcctgcaaggagggagagggctgggttcgactcctgggtctgtagcttagctgtgacttgggacaagccatgctatgtctctgcaccagtaaagccattggtgaaatgtcaccagaattgtttcaggatgctggctaggaggaggtaactgtgtttacgatcccacctatcccataacagaagcttggcagctgggtgcctgcctccgtgggtggggcaggttgcttgcttctagagacgggaactggtggggggacccgaatagcggccactaccctgtggtgtcctggctgactgtcggcggtggtcgcaaggatcccgtgggagaattcatttgtaccctctctgaacagtgcctactttaagtcttttccattctggccattaaagaaaatggacatttgcaatgtcagaaacttccaaggttgttcacttggggtacgggtaacacggtcatgttgagaaaagaaaatctgaactccaaaaggtaaccccggggtagggtagatgagggagagaggtctttccctactaaagggatctccatttcgcaaaaggatttctcacaacccatgaagtagggactctctccctcttactgcgcctttaaactgttgttcaggtgaccagaaacagtgtgttacacgtcccttcagcagcttgtctgttacagagggcggggggtaccactgcccatcctccaccatgcacattattttaaagattcaaagcaatgtaattggtccatgataaaacaaacgtttaaaaacaatagactcagctgggtgcggtggctcacgcctgtaaatcacagcactttggaaggctgaggtgggaggattgcttggctaaggagtctgagaccaacctgggcaacatagtgagaccccatctctacaaaacataacaaaataaaatgagccaggcatggtggcacatggctgtagtcccagctacttgggaggctgaggcgggaggttcgctggaaaccaggaggtcaagggtgcagtgagccatgatcgcaccactgcactccagcctgggcaacagagcgaattcctgtctcaaaataaataaaaaacaaataaaaaataatagtctaatgatggaagtgggtgatagctaaagacacagggtttctttttgaggtcatgaaaatgctttaaaattgactatcatggtggttgcacatatctgtgaatataccagaaatcaccaaattgtcaaaaacaaaaacgggctgagcacagtgactcacacctgtcatctcagcactttgggaggctaaggtgggaggattgcttgtgtccaagagttcaagaccagcctgggcaacatagtattaataatactccatctgtacaaaagaataaaaaattagccctgtgtggtggtgcataccggtagtcccagctacttgggaggctgaggtgggaggatggcttgagcctaggagggcgaggctgcagtgagccaagatctcgccactgcactcagactgagtgagtgtagtcagactgagtgagaccctgttgcaaaaagaaaaacaaacaaaaaaataggctatctgcaatgtgctatcttgaattggaccttagaacagaaaagctgttgaaatataaataaagtcgggagtttaattaattgtaatgtaccaatgttgacgttttcactgtgacaaatgtaccacagtaatgtaagatgttaacagtagtgaaatatgtatgtgtgtgttaagaggaaggtaatatggaaactcggtgctacctcttgcaacttttctgtaactccaaagctcttctaaaataaattattattattattattattattattatttttaagagagacaggatctcactatattgcccaggctggcctcgaattcctggactcaagcattcctacacctcagcctccgaaagtgcttggattataggccaccacgcccagcccctaataaaacttttatttaaaaaataacaatatggccaggtgtcatggctccctcctgtaatcctagcactttgggaggccaaggcaggcggatcacgtaaggtcaggagtttgagaccagcctggccaacatggcaaaactctgtctctgctaaaaatacagaaattagccgggtgtggtggtgggcacctgtaatcccacctactcaggaggctgagacaggagaatctcttgaaaccaggaggcggaagttgcagtgagccaagatctagccttttttggagcgagtctccaaaaaaataaataaaataaataaataaataaataaataatgataggacataatagagtcctgtggtccccctgtcagttcccgcttttggacgtccctcctggccactctctggacgggctcgcctcctgcctttcggctttgctgtggtcccagcctataggtcacactctcatctgcagctgctttttttaaggttaatgtaatttcataaatgatatggatgcaccacctttgtaattcatggttttctggtagcagagtgtcctggttcacaagtgtaccgtcatgtactaaatgttcccctgttcttggcctcttaagttgcttccaatttttatttttataaagaatgttccaaccaacattttaatacatgcagctcctttctgtcttctgttgagttattcttttagaaaacaatctcgggaggtggggttccggagttaagaggcgagataatcatttttaaaaggtatgggcatcagattggctttgagcagtgctagcactgtgcctgggaccgaggaaatgctgacaaaggccatttgtttcacatgtagtcagcgttcctggttgacactgctgtctgcaccctgtctggcctgggagcccttgttttggaaaaccacttattcaaccctacaggctgtttttctccaggccagttgggttttaatggttaaccagcttccaggggtcttccgagtggcagcaggatggaaaatgaaaaagaagtcctgttctgtggccaaaggtctcctgctgaattccgcccgccgtgcttggcccactcctggacgtcgccgggaggaaagggagcagagggagggggctcgccaggatgtgtacacagggcaccacattgcagatcttgcaattctcttttgtcttcccatttaaaaaactgtggtaaaatacaggccaggcgtggtggctcatgcctgtaatcctagcaccttgggagaccaaggcagccggtcacctgaggtcaggagttcgagaccagcctggcgaacatgccaacacaaaccccgtctctactaaaaataccaaaaaagtagccaggcatggtggcacgtggcctgtagtcccagctactcgggaggctgaggcaggagaattgcttgaacccaggagatcaactcaggagactgagccgagattgcagcaagactctgtctaaaataaattaaataaataataaaaaattgtaaaatacaataacataaagtttaccattgtagccattttaaagtacaattcagctacattaaacagagttccaatgttgtgtagccatcactgctgtctagttccagaactttctcatcacccccaaaggaaacctcatacccactaaggcagtctgcagagtttctttcctctctagaactcttttcagtttgggtaggtgcgccggtgactgagggggattggaggaaattaattccctgctgggaacctttaggtgggagtagtggtgataattcttacgtttgcaagctcaagtaagttgaagcacaaagaggaattgcttggctcttggtagtgggaagtgcaggggtttcggctttaggtgtggctagatcgagggctcatgcagtattttcatctcatctctcagttctgtttttctctggggttggcgtcaggcagcctctgcacagccaaagaaacggtccatgctatggtggtccctctgggtcaggatcccagaagagagaggcctctttcctcagtgtccgtcaatctcttaagaggaccctgattggcccagcttgggtcacgtgcacacgcctttgggcagggaggcggggtttcatgattggcagctccagcgtgatcccagttgttagagaaagggatgctggtgaatgaagaagcgcagatgtgcattgcagtgggggagctggaatactggcctgaactacaggtgcaggctcatattttgaccattatcatttgcattttccacctctccacttacgaatgttaattatctgaagctgctacaagaccttacatttatactgcagttgcaaatatagccatttaggtgacaaagggtccattctgctggtataatgctgtctttccacggccgctaaaaccatgcagagactggcatgcctatcaacttcccctctgcttcacggggattcagagcggatgttctctaagggaccttccagatgggcccattccgggtgccatgtcttggggaccaggtcacttccccagctgcactttttgccatcatttccatatgaagaagaagtagattggcttttagtttaagattactgtattaataaacccttgactttttgactgtaataaagtaatgcacatgcattcttgtgctttgtgtgaaacgtggagggtgtaaattaattgcacggtcattgatgtggaggaacttgaatccaggggggcgattttttttttttttttttggagacaatctcactctgtcacccagtctggagtacagtggcacaatctcagctcactgcagcctctgcctcccatgcttaagcaattctggtgcttcagcctctcgagaagctggggattacaggtgtgtgtcaccacacccagctaattttagtggagggatctgtatgtcactaaccacctgcctgaccatgggcaagtctctccctccctgggcctcagtgtcctcatttgtaaaatgaagaatgggatgagttgacttgctgtgtcatattctattttggcgtattctggaaatttttcttttcttttgttttaatggagtaatttgtttatgaaggcattttacctttaaatgaaccttattttactttgccaagggggaaggtgtagtacggtggactttggagccagatggcgtgggttcaaatttcagctccatcacttactgtgtggccttgggcacatggcttaccctctctgggctcagtcacctgatgtataaagtaagggcaatatagtgcctgccttgtagggttgtggtggggattaaatgagcaaatatagggaaagtgcttagaacaatgtcttaatttctgggacccggaagtagtagctgttatttccagttttctgtttagacaacaccgtgatgcacagttcacgcaagaaatgtttctacactgtagattatttccttaggagatgctagatacagatgctcagctccaggacacagggcgtgaatcttgttgttcacggatattgccagccgtcggccacacaggaagggtctggcctcacccacacttgccagcgctgacctcaaaaagctcatacttcacctgtggccggcacacaggtgcatcagcatatggggaaactgaggcccacagcagtgctaggacctgccctaaactcacagttaatgagtgatagagctggggctagagcctggaagaattaagagtgaagttcaactctgatcctctttagtctgtattcagagcctgagaaactgagaggcgtctgtggctgggggaaaacaagacaaaacaagacaaatgccagcaaggccacggggcagcaggggctgccaggcaagctgggcagggcgattgcgatgcccagactccagtccggggaatgcgctgaacgcacagcacgcacggctggctggccacagctgttgtctgccacacagaagtacccggctggtgcccaggacagaacctcgctcctattgttctcgtgtctctgcaggattgtggggacaatgcagtgaccgctggtagtgacctgcgatgtgccagggccaggctctcttgatttagagccatgcttggtcagtgctgcatcatgcttgtcttgcaggatgggttcattcacctgatccttttattgattctttaacataatatgaacgttcacggagccaggaatccagaaggcatgcagctcagctttcaggaacagaggacaacagaggctgctgcctccaaggagaagtggaggtgggaaggatggacgtgccagggatggtgtgaactagccaattggagtctattctgatagcttctgagccccaggactaaccaggcttagtggcgcacacctgtaatcccaacattttgggagaccaaggcaggaggattgcttgagcccaggagttggagaccagcctggtcaacatagtgggacctcgtctctactaaaaacaaaaaaaaattagctggggcatggtgtcgcatgcctgtagtcccagctactcaggagtctgaggtgggaggatcgcttgagcccaggagttggaggctgcatgagctgtgctcgtgtcattgcattccagcctgggtgacagaggaaaaccctgtctcaaaaataagtaaataaataaataaaaataaaccccaggggcaggatcggcttcatttctgggaccagatttagccacccctcccctctgagggcctcttttgggtaccaatgtggcaataatatgaataacaatagttttattgtggccctactatgtgcctgacactctgtgaaggactttccgtgtattaaatcatttgtccttcacgaggccaggtctgccacttgccctgttttatagatgaggagcttgggatccgaagaagctgagtaacttgctcaaggtccgggtgcttggacatggcaaagctatgcctggaatccaggctgtgggctcagagccccgacacggccacttcaccacactgcacatttcccaaggcttctggcaccagggaagaggttcgaaggccgcaagcagggctggatgctccttttgtagactcgtgttgcacatgaaattagtttttaaatttcctgattctcgatcttccttgatggtggaagctttaaactggaacgtgaacttttttgctctgtgcttactttaaaaaagtgctgctgtgtgaaatggagaaagttacggcgtgtaggggagtgagactcaagttgatattctggcgccatcagctcacaggtgtaggactttgggcaggtatttatcactagaatttctgtgttttcacttaggaaaaagagaatgtaaaatttcacagagtggttggaatgattaaagaaaagcagtaggtgtgaaaagggcttctccattttgatgcctggtgaactattcatccttcaaaacccggatttcttaccccattctcctaccagcctcaatcagaattaattgtgcctatatctgtatctactatggtctagatagtattataattaaggaattataattaagtaactaacaaggaaataatctcctaaaaggcagaagccatggctgctttgtgattgtactcctagtgctggaagattactgtgtgctagcacataacaagggctaagaaatgaagaaatgaggccgggcgccatggcttatgcctgtaatcctagtactttttgaggctggagcaggtggattgcttgagctcaggagcctgaaaccagcctgggcaacattgtgagactgcatctctgttttaacataatttttaaaaattaagaaatgggctgggcgcagtggctcatgcctgtaatcccagcactttgggaggccgaggtgggtggatcacttgaggtcaggagttcgcgaccaacctggccaacatagtaaaaccccgtctctactaaaaatacaaaaattagctggatatggtggcatgtgcctgtaatcccagctaccagctactcaggaggctgaggcacgagaattgcttgaacccaggaggcagaggttgcagtgagccgagagattgcaccactgcactccagtctgggcaacagagcaagactccgtctcaaaaaaaaaaaaaaaaaaaagaagaaatgtatctgctcatgtaggctctttgtgtattaccaggacagaagcttataaatgctcagtaactgttctctgcattaaattaaattgtggaagctaattacactcaggggacttggggctaggttgaaatttccaaatctctgcttctgtttcaatagaaagcaggaggctgagcgcagtggctcatgcctgtaatcctagcactttgggaagccaaggcgggtagatcacctgaggtcaggagttcgagaccagccaggccaacatggggaactctcatctctactaaaaatacaaaaattaggctgggcatagtggcacatgcctgtaatcccagctactccggaggctgtggcaggagaatcgcttgaacccaggaggaagaggttggagtgagccgagattgtgccacctgcactgcagcctcggtgacagagtgatactccatctcaacaacaacaacaaaaaattagagaaagcaggagtgagagctgactggggcagccgggagaacctacaaccctccatgggatgagatttacgaggctgctgctcccccttgcaaagcatgagttaccacttagcactcggcggaccatccacagactgttcgctgccttcaaagggtttcagctgtttacttctatgtggcgtgtttacacttccttaagccagtggttcatggaaggacggtatttgcataaccagaagggcctttttggcctgatgcatttcacctgggcctgggctcaggccgggggcacttcttgttgctcatgtcatacatacatacatacatacatatattatatttatttgtttgtttgtttttagatggaatctcactctgttgcctaggctggagtgcagtggcgacatcttggctcactgcagcctccgtctcctgggttcaggcgattctcctgcctcagcctctcaagtagctgggaccacaggcacctgccaccatgcccagcctaatttttgtatttttagtagagatggggtttcaccatgttggccaggctggtctcaaactgacctcaggtgatctgcccgcctcagcctcccaaagtgctggcattacaggcgtgagccaccatgcctggcctcatgtcatatatttttaaaacacaaattgcacaattgaaaaataaaaagctcccatgcagcctgtgaatggtgggatcaggtatcgtatatggagggccaggcttattcatccatgagccgggggctgtactgaccccaatatacagatgaggaaactgaggcttagggaggactagttcttgagccaagatgagtgttcaggtggaagctagaaggtgggggactggaggccactttaaatgtggggcttttataatgggagggcagtgaggagccctgggaagatctgaaactcaaaagcgatgcatctgctttgttgatcttttactaaagaggttaagagcccttaggggagctgaagtgggaggattgcttgagcccaggagttccagaccagcctgggcaatatagtgagaccctgctgctacaaaaaatatatgaaaaaattagccgagcatggtgttatgtacctgtagtccaagctactcgggaggctgagcccaggaggtcaaggatgcagtgagctatgatcacaccactgtgaggatgcagtggcactccagtgtgggcgacagagcaagaccttgtctcaaaaacaagtcttagagggaaaaacagtctcctaggagaaagaaggagatccctgcaccctaggtttgggcctggcatgtaaataaagccacctgaataagcaaagaattctgcccagcgggctgtgacctggctgccctccaccaaactccagaccagtgccagcccttggccagcctgccctagcctggtacctgccccaggcacctgccagcagctggcctccggacgctgtggtgcagtgattcccgacacagtcgctagcacggtatacagtcgctgtgccgtgaggatgcagcattcgaacgtgtacaggtcttaacctgaagaaatgaatctggagagctctttgtgtgtgaagtgcatgtttcccagccttcatgaaaggccgaaggctcactgcactctacatcttgcccctgtgtatgagtgtctttcctccccctcttctcttcctcttccctggaccgctgcatacttttgtccacctcttgtcattctttattctcggacatcttgcctcgtgagattcccttatgaaacaagcacacacgcttagtcttcgccccgtggtggttttattctaagtcgctgtggtttgccgaaagggttccgacaaaatgcaggagctaagtgatcagccactaccctccacctcacacagaggggtctgccccttcccgtggagcccttgccacagcctttagcagagcagagatatagcctgtgtcctttctcttgacatttcctaaatgctttttgtttttataatttgtttttgagatggcattttgatcttgtcaccgaggcttggagtgcagtggcacgatctcggctcacagcaacctctgcctcgtggttcaagtgattctcctgcctcagcctcccaagaagctgggactacaggtgtatgccaacacacccagctaatttggtatttttaatagagatgccatgttggccagactggtcgcgaactcctgacctcaggtgatccacctgcctgggcctcccaaagtgctgggattacaggcatgagccaccatgcccggcctgtttctattattgtaatggccaaatattattttgtaagtggatgtagtacaacatatgtaagtctgtgatacccattttgtgtgtgtgcacacctctgtatggtggtgtgtgtgcatgcctgtgtgtgggagtggatgtgtgtgtgcctgtgtgtatatatgtgtatgtgtgtgcactactgtgtatgagggtggatgtgtgtgcatgcatgtgtatatgtgtgtacgcatgcttggatgtgtatgtgtgtgcatacctgtgtgcacctgtgtgtgcatgcatgtgtctgtgtgtgcatgcgtctgtgtgtatgcatgcctgcatgtgtatgtgtgtgtgcatacctgtgtttctatgcacctgtgtgtgtatacgtttgtgtggacatatccctgtgtgtctgtgtgtgtatgtctgcacatgcctgtatgtgcatgtgcatgtatgtgtgtgagagggtgtgtgcatgcctgtgtgtgcgcacctgtgtgggtacattcctgtgtgtgtgtgtgcacacttgtgtgggtgcatgcctgtgtgtgtgtgtatgcctgcgtgtgtgtgtgttggtgtgtgcatatctgtgtttgtgtgcgtgcatgcctgtgtgtgtctgttcctccacctggtgagttccctggcgtggagtgaatcctgtgatctgctggctacttcacttcctttgtcctcagttttctcatctgaaaaatgtgtatgataatatctcatggaattgtgaaaattcaataagataccatgtataataattgcctggcgtatatgaagtgttacgtagatagtatttacttatttatccaacttttgctgaaaaatggaaacagcctggtatttactggcaatgaacatctttgagtatgtatgttgttattttttaaaaattctgttatttctttgggaaaaatccccaaacatggatgtggctgaggaataagaaatgctgggcacagttttgatggggcagaagttgaagatctgaacctggatttaatctctagcttgtcaactgatcaataagcttgggctatttggagctccgggttaagggagattctgaggttaagcctggactcggtggggaaagtgccatgattaatttgtgatgtctcctgtggacaccggagagaggagagtatgtttcccacttgctttccatgcctggtctagatgaagccgtagttagaaattaggcaaggtgcgtttggggcttctgtaaatctctgtggtcaggaaagccgagcctgagactccaggcagttgcccaaatgctgaagaggtcaggggccctgtcggggtcacagatccaggcataggaacagccgcctctatttggttttggccaaaacactcacagcgtgcttctaggacatcacagtgtgcttctaggacaccatgccttccatcttcattagatggttaccctgtgtccacccgaaatacagccgtgtgcctctgtcttggcttttgttcctcaagtacagcagggtcgcgtcactcctgagctacgagggtttgacacaggtgcctttgttcctgaatctgtcaaacccgagcccgtgccattttgatctgttagtttttccctttatctataatgactcatgcctattataagaacctgttccggccaggcatggtggctcgtgcctgtaatcccagcactttgggagaccgaggcaggtggatcacctgaggtcaggagttcaagaccagcctggccaacatggtgaaaccctgtctctactaaaaatacaaaaaatagctgggtgtgatggcgcatgcctgtagtcccagctacttgggagactgtggcaggacaatcgcttgaacttaggagatggaggttgcagtgagccgagatggtaccactgtactccagactgggcagtggagcaagactctgtctcaaaaaaccaaaaccaaaaccaaaaccaacaaacaaaaaagaacccattccttttgagtaaattataccttgctggtagagtttttaaaacctcggtctttcaagcactttgaatagttgtgggagggaggtgtaggggcctcggtggggttggcagcaggtgcccagtgggtttcatagctgtgtgttttcatttggctcctcttccttggggattgccttgtctcctagcaagattcagggtgctggggactgtggctgtatttcttcagcagttcagagtctttggtttattggtcatcatcacccacttgtggaaaagacacattcatgtgtccagcacatgtcttgtctatccccggctccatcttatgcctgcgggaggggagattctagtccccacaccgtgttgtgagggtttgggaaggacctgaagccagcaggcagccttcattgtgagagctatgctctgatcccaaagctgacttttccatgccaggtttccccattgccctaggatctggtgtccctggtggaacttcgtcccgtgtctatgtgctctggaggcttaggtgtaggatccctggatgactggtggggaaaggctgggggaccctgttgtccagccttcttctttcacagaggtggaaaccagggcccagagccattaaatactgccttccgggcatttcagagcccgctgcttctatttttctattctcagtctgtcagagagaccagtaagtaccagaattttgacttcccagagcctaggagagtgtatggcatatgacaggtgtttattaatgtgtgttcgtgggaagaacaaattgtgtcgctttcattgtctttcaatacaatgaagatcagttcctctcctgggccccacttcatagaaatatgcattcctgacttcacaaatggaactgcccaagaatccccactcatgttttctccccggagcttcccctgcacccacattctctgcattggttaggaatatcctcataggcgcaacactcctgaatagcagaccttacacttgtaccccgacaggcctccttgttccctgaagctaaccctgggcctggctttggggtttgcagccggatttgtcatcttctgtctgccagtttcactgacttggttattccaaggaattcctgggacttccctttgttaaaaaataaacgttaggaatgagaagaggaactagctactgcctgtgtcttcactctgagtgactgagggaacttcattaaatctcagattcccctaacgatcctgagaatgaaggtgaacccacagtcctgtagaacattctctctgactgttgagcactccgctttgtaccaggtgttctcatcaagtgtgcaagccccttttatgctcatacgaccctcccaacagccctaggatgtgaagctgctattgtccgcatttgcagatgaggagactcaggctcagggaggttgagtccccagggaggctcaggccactggagatgcctgtggacaagggtgcctgtttgtatttggcctggacctgctcccagcatgctggggtttaaacctgggcagttgggagccattaaaaaatgaaaaggggtcaggtgtggtggctcatgcctgtgatcccagcactttgggaggccaagggggggagatcacttgaggccaggagttcgagaccagtctggccaacatgatgaaaccctgtctctaataaaaatacaaaaatgagccggccgtggtggtacgtgcctgtaatcccagctacttcagaggctgaggcaggagaattgcttgaacctggaagtggaggttgtgctgagctgagattgcaccactgcactccagtctgggcgacagagtgagactccgtctcaaaaaatgaaaataaataaaaataaaaatgaaaaggatgggctgggcgtggtgactcacccctgtaatcccagcactttgggaggctgaggcgagtggatcacctgaggtccggagttcaagaccagcctggccaacatggtgaaaccccgtctctactaaaaatacaaaagttagccaggtgtgatggtgggcgcctgtaattccagctactcgagaggctgaggcaggagaatcgcttgaacccgggaggtggaggttacagtgaactgagattgcaccactgcactccagcctaggtgacaagaacaaaaacttcatctcaaaagataaataaataaatgagaaaagaatgatttaaaaccaagacaggagaacatgcactttaaaatccagccttgcaaatagatggctagactctgtacagagcccctgtacctaacccgtaccctctgctatattaccctcctcagaaaggtggagacaggtttcgttggatgtttattttgcatctttgaggcatgaatctataagcacttgagaaaggtcacagggacaaaacttgtcttcattcatgaccagcctggccaacatggtgaaaccccgtctctactaaaaatacaaaaattagccaggcgtggtggtggttgtctgtaatcccagctactcaggaggtagaggcaggagaatcacttgaacccgggaggcagaggttgcagtgagccgatcgcaccattgcactccagcctgggcaacagagtgagagtccgtctcagaaaaaacaaaaacaaaaaaactggtcttccacttgctggttgcataattccaaaccattcaagcagcttcagccgcttggagtgagacttcgtcggatgaggcccttggaagaaaatcctgctttggcaagaaaagagaagtcccccgtctggcagctatgagagagcgacaccgagttcccagacaaaacaaagagctttcttcagccacaggtgacggtgcccccagactgacacatgttgctgtgcagtctctggcaggttgtggcagctgcctcgagggcttggcagtctagagcagcccctggaggcgggatgtggggagaaagtggggctggcaccaggaacgcatccccagggccctgccgggaagttgctgtgtcccctgggatgaactgcgtcccctctctgggttgttgctggtcctctacataatgaagaggtgaatggcaggtctcaagggtggagtgcagtggtgcgatcatggctcacggcagcctcgacctcccaggctcaagtgatcttcctgcctcagcctcccaagtagctgggacaacaggcgcacaccaccactgttggctatttattactattattattattattatttgtagagaaagggtcccactgttccccaggctagtcttggaactccggggttcaagcgattctcccttctcgacctcccaaagtgcttgggattaccggcgtgagccacagcgccccacctcccttcactattttgttcagctgaaacacaatttacatagagtaaaacgcagagatcttcggaatactactcgttgagtgtgtgtgtgtgtgtgtgtgtgtatgtatatatatatatatatttttttttgagacagagtttcgctcttgtcacccaggctggagtgcaatggtgcgatctaagctcactgcaacttccgcctccccggttcaagcgattctcccgcctctcacacccagctaattctttgtatttttagtagagatggggtttcaccatgttggccaggctggccttgaactgctgacctcaggtgatccactcacctcggcctcccaaagtgctgggcatgagccactgcatctggcccaagttttgtgtattttgaatgttcatgatgcatacctttgaagccaccacccagatctggacatggcgcagatgtccacccccgtcagatgggctctaatgctctgcgattcacgattctgtttgcctgatcacattattctttcagacgctttcatgttctgtctagacctgcgctgttgccggccacgtgtggccactgagcgcctgaaagcgcacccagccatatcagtgtgtgccgtatacccggagggcacacagcgtttctaaggctgggttcaaaagaaatgaatgtaaaggacctcgtcagtaccttttagcattgattacattgtggaaatgacaatattttgcatatattggattagataaaatactattaaaataaatggcactggtttctttcttacatttttcaatgtggctagtagcaaattgaaaattcccggccaggcaaagtggctcacacctgtaattctagcactttgggaggccgaggtcagtggatcacttcatctcaggagtttgagaccagcctgggcaacatggtaaaaccccattatctaccaaaaaaaaaaaaattagtcgggcatggtggtgtgtacctgtagtcccggctacttcggtggctgaggtggtaggattgcttgagcacaggcggtggaggttgcagtgagctgagattgcaccagtgccctccagcctggcagcgtgggtgacagagtgagacctgtctaagaaaaaaaaggaaagaaagaaaattcaaaattctggcctttgggaggccaagatgggtggatcgcttgagcccaggagttggagaccagcctgggcaacatgacgaaaccacgtctctacagaaaaatacaaaaatcagctggacgtggtggcttgtgcctgtatttctagctattaggaaggcggaggtgggaggatcgcttgaacctaggaggttgagcctgcagtgagccgagatcgcaccactgcacgccagcttgggtgacagagtgagactgtgtttcaaaaaaagagaaattaacattctgtgtgtgtccgcattgctctaggccctggaagtctccttctgatgaaggacttgcctcctgagtcttgccacctgcccctgcccccgtgggtgttggtggcatgtgggtgctggcaagtgctgtgtcttgaggtgtgtgtggtgtaggggtggccacgctttgcatgcatatgttccctctggtttccagcctcaggtgcaaggcagacttcagctgctccacgcaggctccctccagtttcaggcattgctcccaagtcagagtctgtctgcccagagctgttttgctcagcttctgcctcgttttgaaaacatgcaatgaagcccactccccagtggtgcttgcaactcccttatctcatgggagccgctggaaggcgtggaggtggagaggtgtggaggttgttttcagttggtttttaggctgaggctcaggttagacattttggggacattctgtggagtccacgccctgaatggaaggtgctggctcacctttgtaagcctctgggggcttgggagcaccccgtgtaggatggaggcctgctagtaccccctccatgcggcctgaccacctgggcccctgcagagttgctgctggccctatagaaggtgggagcggctcggtgtccactcaggagcaggctggggtccagctctggctgcaagggaactgaccactgttggtcacaggcccgtctcaccgtctcacccatgtgtccacgtgacgtccaggcaatgggcccgtgcatgaccagtctgccggtgaggtgacagcggggagccgatcccagggggatgattggatggagatgtagacactttatttggaaggtgctaggagtcactgccaggctcaaagaacggggaaggggtggacaagacacaggagcagcacgaggaggagacacaaagaggggagggaagctgatgggcaggggggagagatgagcggacccaggtgcaagggtggagagcagtgggctggggcatgactgccgcttaaccagcctcatggtgtcactcgccgagcctcagtttccccttctgaattgaggggcaagagatgacctctaaggaccaccaaccctgctgtctatgaggccatggtgatactaaggcccagagggagcccggacctccagtgtcctccgtccatcccttctctctgctcggctttgcactggcgtgggctgcatcgagtcccaggctgtacaccttggcagtcacgcggcgggggctctcgtgtgaggacgggagcagagccaaatgcaccagctgtcagccagactgaaggtgaagggagccaacaggctcatgtctgaatacaaggtcttcagcccacccctggaggcagtatgtcaggattcttccgaacagagaatctggggtctgttctaaaggggcctagagcatggccatggtcactgtatcttcagaaatgtttaaagttttgtctttcttggtcattggaagaggcaaaaaaggaaaaaaaaaaaagcaggaatgagggaagactcaattttgcacattctctctgtgttcccctgaggataaattggaaacgaaataggaatacaggacttttaggtatgagccagttcagtgtgttaagacacttgctttctaaccctttgctttttggcagtaatcggattgctggacgacttgtcttttaagacctctctaagtactgatgataaaaacagcccttcaacagggaaaataaccttccattctattttctaccgagcagagaggaaagaacatcagctgagccaggagggttatcaagttgcaggatgaccctgtttatcttgtgagactcagtttgctttaaatgttttcagagatcatatggttgcttttgtatatacttttgtttgtataacttggaatcatttttctgctaatcttttgattttaaatatgtctctggtatgtagtacaaggtttgagggttttttttttgtagtttgaaacatagcatttttaaagataattttgttcatttacatttattgttatgttttactagatctgctgtctgttttgcttgtttttgtttcattataatttgatttcctaagtacttgtggttttaggttgacctgtgcctagctccatgtatctttcatttgagatttcttagaccttatcaaacttatttttctttttttgagatggaatctcgctctgttgccaggctggagtgcagtggcgccatcttggctcactgccatttctgcctcccaggttcaagccattctcctgccttagcctcctgagtagctgggattacaggctcgcgccactacacccagctgatttttatatttttagtagattagggttttcaccgtgttggccaggctggtctcgatctcctgacctcatgatctgctctcctcagcctcccaaagtgctgggattacaggcatgagccaccatccatggctctcaaacttatttttcttaatctaaatcttctaatagctaaccgactggaacttcaagtgttcttatttctgtagattgccatatatagctatcacaaagcagaggaactttggacttttcttctataagcatcttaagctgttggcttcctccttctgaaagctctctgcccctccctcatgccgtggggctcagggttgagaaatacattaattctcaattctcctttctggctcttacatccaacttgtgttctttcattgcacggatcacatacacttagtaacacactgtagtggggtgggaacagaaaggatctcaagggtgttctgtcattctgggcaaatctctccaagcccagcccatgagtcttatcttcaaaaagtaaaataaaataaagttaatatactgagggctgaacgagaacatgagtgaggctgttcctggcacacatcagctgcttgataaaaattaacctcccgttctccactttgttagtgttctcagtggctttgcgcgccaaatgcattgtctttttattgtaaagcttgacttcgggatgctcctgggctcatcattcttggcaatatggcgacttttttgttttttattttttaattgtggtggaattcatttaacataaaatgaacctttttatgtttatttatttattttgagacagatctcaccctgtcgcccaggctggagtgcagtggcgcgatcttggctcactgcaacgtccgcctcccgggttcaagcgattctcctgcctcagcctccccagtagctgggattgcaggcgcccgccaccacgcccggctgatttttgtagttttagtagagatggggttccgccatgttggccaggctggtctcgaactcctgacctcaggtgatctgcctgcctcggcctccaaagtgctgggatgacgggcgtgagccaccgcacctggcctgaaccattttaaagtgtacaattcagtggctttcagaacattcacagtgttgtgcaagccctacctctgtctggttccaaaactttttcatcaccccaaaaggagatggtggctctttcaagacgccagctttggcatcaactggaccttctggttgtctgacttcggacaagcattgtaatttccagcctttgtttcctcacctttaaaatggaaataatgttgatcaccttacgggcctttttaaaaagaacttgattgaggtatgatgtatgtacctcaaaatcaagtcatcctaagtgtactttttcagtactttttcgtgaatttgtggagttgtgcacccattaccacaatcccaattttagaacgtctctatcatttcctgttcccatctccagctctgtgtaaccacgagtctgctttctgtctgtatgggtttgccttttttagacatttataccaatggcagctgacagtacatggtcttcatgcctggcttctttcactcagcatcctgtttccgaggttcatccatgtagttgcgtgtggcagcgcttcattcctctctgtggctgaggaatattccattgtgtggacggaccgtgttttgataatccactcctctgttgatggacataggggttgcttccaccttccatgattcatatttactactgtgtgtcattctcagtactgtggcactgtgctggtacacataagtgcttaataattgtggttagccgggcgtggtggctcacgcctgtagtgccaacaccttgggaggccaagctgggcggatcacttaaggccaggagtttgagaccagcctggccaacgtggcgaaaccctgcttctactaaaaatacaaaaaatagctgggtgtggtggcagacgcctgtagttcgagctacttgggaggctgagacatgagaatggcttgaaccctgggggcagaggttgctgtgagccaagattgcgccactgcactccagcctgggcaacaggcttttctctcaagaaaaagaaaaatggtggtcattgtttatgttatttccttatgggctttttttttaatgtggatgattttcttacctttagacgtgttatttgtggttttgatagcttttttttgtcaagctgtccgtcatcgttctgaaattttgtttgttaaagtcttatgatccacatatggcagtaactgtgtatcatcatggcttaagggtgtctgataagccaggtcacctggttccctcattcatgccacaagcgtttactgagtgcatcatgggtgcctgcgggttctatgggtgaaacctgtgtactgcaagaggaaagactgactgcatccattttgctgagccctgtagccccacagcctggcgtggtatttgttgaaagaaggcagagcctctaccctcgtgtaactcagtgcgggtggagagcccatggcagacccaggactggaggctcctgcgtcattaggaacattggtggctgaagcttgcttgtcccagctggcgagagccaattacgcctgtctccttccacctccacgtatggtgacatcactttgatagcttgacgtcagccactgggggactatttacatcatggatatgggcaaaagacaccaatctgagcttttgtccttttcttttttttggagtgcctgcacacccgtgagcctttccaacctcgtaacctattattttcctgacgagatagttttttacagatgagaaagttgaggcacagagaattgaagggacttggccaaggtaacagcccaaattcaagccccagcttcctcgggccatccccacggacatgggaagacgcagcatcagatctgccccactccctcctcccagtcaggttttttctgccagatgactctgctgttcaatttccattgactctgctgctgaatttccatttccatctctcatcagggttttcagtgctttgcttcccagtgtgttgcctgagccaccctcacatcctgtgccttccttcttaataggaacgctgtgttttcctttgttcttgcagaatttcgctaaggagtttgtgatcagtgatcggaaggagctggaggaagatttcatcaagagcgagctgaagaaggcggggggagccaattacgacgcccagacggagtaaccccagcccccgccacaccaccccttgccaaagtcatctgcctgctccccgggggagaggaccgccggcctcagctactagcccaccagcccaccagggagaagagaagccatgagaggcagcgcccgccaccctgtgtccacagcccccaccttcccgcttcccttagaaccctgccgtgtcctatctcatgacgctcatggaacctctttctttgatcttctttttcttttctccccctcttttttgttctaaagaaaagtcattttgatgcaaggtcctgcctgccatcagatccgaggtgcctcctgcagtgaccccttttcctggcatttctcttccacgcgacgaggtctgcctagtgagatctgcatgacctcacgttgctttccagagcccgggcctattttgccatctcagttttcctgggccctgcttcctgtgtaccactgaggggcagctgggccaggagctgtgcccggtgcctgcagccttcataagcacacacgtccattccctactaaggcccagacctcctggtatctgccccgggctccctcatcccacctccatccggagttgcccaagatgcatgtccagcataggcaggattgctcggtggtgagaaggttaggtccggctcagactgaataagaagagataaaatttgccttaaaacttacctggcagtggctttgctgcacggtctgaaaccacctgttcccaccctcttgaccgaaatttccttgtgacacagagaagggcaaaggtctgagcccagagttgacggagggagtatttcagggttcacttcaggggctcccaaagcgacaagatcgttagggagagaggcccagggtggggactgggaatttaaggagagctgggaacggatcccttaggttcaggaagcttctgtgcaagctgcgaggatggcttgggccgaagggttgctctgcccgccgcgctagctgtgagctgagcaaagccctgggctcacagcaccccaaaagcctgtggcttcagtcctgcgtctgcaccacacattcaaaaggatcgttttgttttgtttttaaagaaaggtgagattggcttggttcttcatgagcacatttgatatagctctttttctgtttttccttgctcatttcgttttggggaagaaatctgtactgtattgggattgtaaagaacatctctgcactcagacagtttacagaaataaatgttttttttgtttttcagaaaacagtttggtttctgatttgtcctacaaagttcttttttttttttgctgtaataacagaggcagtcatcatcgccttcagatttaataggtgtttgcggagctgctgaggccgggcacattcacattcaatagcttatttaattcttagcaaccataagaaacaggtgctgcttttgtccccatttcctgaaatctgaggctcagagggactcattcacccgaggtcacccagatagaaagtggcagagctgggatttttttttttttttttttttttggtgacagagtctcactctgtggcccaggctggagtgcagtggggagatctcagctcactgcaacctccatctcccagattcaagagattctcctgcttcagcctccatagtagctgggattacaggtacccgtcaccatgcctggctaattattgtatttttagtagagatggagtttcgccatgttggccaggctggtctcgagctcctgacctcaggtgatctgcccgtcttggcctcccaaagtgctgggattacaggcgtgagccaccacacccggccagagctgggatttgaactgagatctctcaaagtccctggtgctgtggcttgtgaggggagcggggaggccacacatttgggatagcgatgggaccacaggtagtgattctttttgagtggccagaactcccctgtctgcctgtttaggaaaagccaagagaaagcatcttcctcgttggccatgacatcctttccgaggttatcctacagctgagaaactggacttccagcacaccagaccctgtgggagcccagaatcagggcagaggagtttcagacacagacagcggggcttggaggagctgagtgtggggcagggagggtgcggagagagggcagaagccgaaatcagggcaggaaggaatcctacaaggtatgggcaaggccctgatcatgctgcccagggtggcagggggccataggtcaccaccctccccagccccagcccaccccagccacgtctgggttctaatttctgctcatctgttcacagctgtgtggatttaggcaatttagttaacctctcagcctcggtttcctcatctgcaaaatagacaacattgcctacgtgtagaaaggcttaaggagcagtgaggattgtgcaggcaaagggcgcctgtcagggtgcagtgttcttatctcacgcctgccactggtcttgttagctctgtgggcttccgtcttttcctatacccagagctgagggagctaaactaggtccgttcccagtgcacgggttttagctccgttcagaacatgggctcagtaggtgcatgacttcatgtcactcatgcactgcgtcccgcaagccttccatcctctcctggaatctcctggtcggccaagccctcctccaggcccactgcccaccccactccctgccccaaagcagactagaaagaatgagcagctctcaaatctgcccctaggcctgtggtctcatccctggctgtgaattaggatcactgggagctttgaaaatacagatgaggcctctatcccagactagtgagtgaaattggagtgccagactcaacgaacgccagcttttcctttccagacagctgcagaagtggccctgatcccgggcaggaggggctggaagggaggcctgcctctccctctgtgggttcctctcgtgagtggaatcttgtttgttttcattttgttagttttgagacagggtctcactctgccacccaggctggagtgcagcggcacaatcacagctcactgcagtctccatctcctgggctcaatcgatccttctgcctcagcctcctgagtagctgggactacaggtgtgcaccaccatgcccagctaagttttgtatttttttagataggaggtctccctatgctgcccaggctggtctcaaactcctggacttgagcgatcctcccacctcaacctctcagagtgtagggcttacaggcgtgagccactgcacccagccatgactggaatcttgaagggcaagtgcagacaggtttattgagcacctactatgtgccaggcactggcctaggtatggggatttgatgatgaacaaactcagacagcccccaccctcaaggaggctgagtctagcagggatgatggatattaatcagcttgtcccaccagagggtgtgtgtttccagatgaggataagtctccttcagagaaaaaagcccaggttccatgagagctcacaagggccctggatgtggctagggtatgggggagggcttccctaaggaggtggtacctgagctgagaacgcggggaaaggaggggaggaacaggaaagcgtggacataagctccatggaatgtttgcccacgggtgagccagggtctgaagcagcttgtttgtgtgtcaaggagcttggctttaacttgaaaactgcagcttgggcctttgctggggatcccaagggatcatgagaccactgaaggcagagaaaccttgccttttttttttttttctgagacagagtcttgctcggtcacccaggctggagtgcaatggcgctatgtcggcccactgcaacctccgcctcctgggttgcagcgattctcctgcctcagcctccccagtagctggggttacaggtgcccgccaccatgcccagcgaatttttgtgtttttagtagagacagggtttcaccatgttggccaggctggtgtctaactcctgaccttgtgatccacccacctcggcctcccaaagtgctgggattacaggcgtgaaccaccacactcagccctatttctcagctgtgccaggtgtttataccccagaggttatctggggctggtgagggagtccaggcccagggtgcggccctggctgggggaaagttcccgtgcagctcgtgccctgaggatgggctgccctcgttgaaatctttctgttccccatttcttagtgaaccataaaagagagaaacaagaagcagaaaatgtgcatagtccaagtgatgtagaaagaattttttgaaagaaccagaaacggccgcggccaccagatgactcagtaagagacagtaggcagcacagccgtggctcagagctcagccttgggctcaggtttgagtccgaggtccgtggttcacccgccagatgaccttggccagtagtgtcacctctctgagcctcagtttccccctctaaagatcacagcacttccctcatgcatttattacaaggactaagtgagctgagccttgccaggtgcttagcgtgatgtgatctgttagattccgatggggactctgcacagtcctgggggaccatcctcgtttggagcaagggctgtggccatgaacagctcaggcctaaccccgaggcagtgacggagccgtctgatccttctacccctgcttgtcagtgtcgccgcccgtgggctgctgctacgaatctagggcttggctggcatcactttgggtacacaaatgtctccacctgggcagggtctgggagggagcaaaagacatggctcttcgatccctgttgggaaggtggggctgggactgggagccagcacagtgtgaggggaacggttggaacccgagttccccgcctacaggccgtgtgaccttaggcaggatgcttgcctcctctgaagagttcccaaggtaagtcacacagctatacgaggttcagccgggcagggatgtaccagtctcttgcaaggggggtcaccaaacgtttgtgaagagaaatacagcctaccacacacacctaggaaacagctgagccaggatttgaacccaggcagtgccgggttcaagcatcttttcatgaggtcatgctgtaggatttcacagaagtgaatgaatgagtgagccctaacattctgtgcaatggaaagagactggctagtctgccggggtcctcagctgcctcatggaccaggacaacagcactccccagcactccctcagcaggtgctccctgcaggctggaggaaggatggagcaggaatttcagtaatccaggttgctatccaaagaggaagaaggaccaggcggccaaacttcaccatggccaggtgtcccaacagcataaaaacaaaagctagccaggcgcagtgcgcacacctgtagtcctaggtatttgaggctcaggcaggagacaccttgagcccaggagttctggtctgcggtgcactgtgctgaccaggtggcatcaatacagtgagacttcctgggagcgagagaagcttgggttgctttcagctccgagattcctcccagcctgacagatgaggcacctgcaacattccatttttgtttgaatgtaaatgaattccttttttttttcttttcttttcttttttttttttttttgaagcagagtctccctctgttgcccaggcaggaatgcagtggcacgatctctgcctcccaggttcaagcgattctcctgcctcagcctcccaagtagctgggattataagcacccaccaccatgcccagctaatttgtgtgtgtgttttgttttgttttgttttgttttgttttttgcaacggagtctcactctgtcgcccaggctggagtgcagtggcgtgatctcgcctcacggcaacctccgcctcccgggttcaagcaattctcctgcctcagcctcctgagtagctgggattacaggtgtgcaccaccacgcctggctaatttttgtgtttttggtagagatggggtttcaccatgctggccaggttggtctcaaactcctgacctcaggtgatctgcccacctcggcctcccaaagtgctgggattacaggcatgagccaccacaccggctaaatgaattcttaaggcatgaaactaagggaaaaatattttttagagctttttttcttcaggattatgccttaattttgagcctttccttgcccatcagaacagttcatcctaaattaagaaaagaatttcacctttttccaacagcagctccatgttagctttttgctacccctcacccactcagcatcctgtggtcaatggcaaacttccggaagggctggaggggctctgcgtgtccctctagccaggaccttgtccaccttcctcctcgcatgcccgcatccgggccctgacatccttcctctacttttctgaaggctcctctctttccctctagagagagactggtctctgctggtctgcctcttctagaaggttccctgtgtcctgtgaagtgggctgaatcatggctcccaaaagatttgtctgtgccccagaacctgtaaatgtgatcttatgtaggaaaagggtctttatagatataattaaagatcatcctggatttagggcagcacctaaatcccgtaacaggcatcacagggagattttagacagagacaagaggcaagagagatgagagatgagagacaagagaggcggacacgtgaaggcagaggcagagattggagtgaggcctctgcaagcttggagccaccaggagctagaagaggcaggaagcttcccctagagcttccagagggagcatggccctgcccacactttgatttttgacttctgacctccagaatcgtgagagaatatctttgtgttgtgttgagcccccggtgtggtgactgactgtggcagccatggggaatgagtccgccctcttccctccctcctccagttgcttctcccctcccccactaactgtgcgcctctctggggcaggtgccccatcccagtgcctggcgtgaggccttgtacacagtaggtgctcactaagtggtcagtgaatcagcttcagtggagttccccagtctgaaaggggaggaggtggggccctgcccagctctttgagccacacccagaatccatacctgctcagatggggctcggacctagcctatgccgaactaggcaatgagaccagacgcctttctggctttctccgcctgggtgctggctcttgcctctggctctgccccagggctggccctggaggacagctatcccgtgcgcctgtccacctgtctggctcttccaacccagctgcttgaccccgttaccctgagtcctccacccttttaatcgtctctgagggagtcttaagataccgctaccaggagggggctgtggaggctgccgtgtgctccaggctttgggttctgccaagtgctccccaggtgcgaggtgtgggactttgaatccctctgggtggggcaggagaggcaggtgttccctaaggctaaaggcacacaaggaagtctggggcaggggttgttctatctgctcgtgctgggaacgtgttgagggagctgcaactgcaattgggggataagcgagtaaacgagtcttttgggcttggagtggtggctcatgcttgccatcccagcactttgggaggctgaggtgggagaattgcttgagtccaggaggtcaagtttgaagtgaaccatgatcgcgccactgcaccccagtgtgagcaacagagcaagacccagtctcaaaaaaagaaaaagaaaaagaaaaacccctttgaactgaaggctacagtccatgggttatttctggtacacctgagagaatgagagagcaggcactgaattctttgctccttggttcatccccagcagttcccatgtccggtgtcactgcggaggacaggccacaccactgcgtgcacgcacaggcaagacaagctgtgatggctctattaaaccccagaacataaaggcaggtataaaaggcagcttacaaagtgatcggggaacagtgataacacttgtgctaaatttccaaacaaaatcctcagaccttggttttgagtaggtccacccgagcagagatgcatcgggcacaatgaaaacgagaggtgagccctgggaggagggtgggaggagggtgggaggagggagggaagaggggaaagacagtgctggagtggagctttgctgtgtctttctgggctcatgtattttttaaaaagctgaaggaaataagtaagatgttagcatctgggtaacaaaccttacagatgcatatagtaagatgttatcatctgtgtaatgggtaggtggaaattagataattttccctagttttctgtctttttggagtattaaagttaagaaacgttttttaaacacagaagggaattcatgtagtacatatcaatcagagggaggaatgtcaaactgctcacctggaacaggtgatttggtttaaaatacacctgttggaagagtcggcaggatgctaagaagaaagtaatgagggttcttacaatgggtcaattaagatcagagaggatagattgctgctcaatgcacgagttctgagtatgaagattcaaacactaccacaatgcagctggttgctgctgagaaccaaattcgttgtctgaaaggtcaagagactgaagctcccagtgccctcctgtagactgcctccctcagcccgggagcattcactgcccaggccctcgtttcctatacccctgtccccatcccccagcctcctcagatgccttccacctgggtgctggctgcctctggctccccgcagtccctatcatccctagtagagcccagggctgcagcaggggcatgtcttatacatctgtccagctcctccagctcctggcccagtgcctggcaaacagtgggagcccagtagctgctcacttaatatatggatgccacctaaatgagttcataccacaaagagaccagcaatccctcgatcccatctccaggttggcttttagaaccgtgcttctcaaaggctgtccccagaaaccacctacagcaaaaccaccctgtatatttatgaaaatgcaggttcctgggcaccgctccagaccccgtgagtttcagtctttggggatggtcccaggactacattttaaacgagtttaccagatgattcttagatattcttatgagaatatctttacagaggatagagcctaataaggcttttgttccagtgtttggaatgcatggtctggggacccaagcactagcgtcacctggatactagcttaaacagcacattccacaagacctatcccaggcacagccagggcaggtagtaatctgtgtttgagctaactgtccagggccatgctgaaatacgttggagtttgaaaagcattgcttttggccacagtcctactctcttcctttttgctagaaaacaaactttgatttcattttagaagaattattgttattattttttgagacagggtctcactctgttgcccagactagagtgcagtggctcgatcatggctcactgcaggctcgactgcccagactcaagcgatcctcccacttcagcctcccaagtagctgggactacaggcgcaggccaccacgcccagccttttttttttttttttttttttaatttgtagagacggggctttgccatgttgctcaggctggtctccaactcctgggctcaagcgacctgcccatcttggcgtcccaaagtgctggggttacaagtgtgagacactgcgttcagccattagaagaatttttggaatgaacttaaattttttaattttataagtatttacatgccatcaaaaaatattgagaaaacacagagataaagaagatgaaaataaaaatgactttatacctctctgaggttactgttgtcacatttgggggtgcaaccttgcagactattttgaaaaattttaagttctggggtacatgtactggatgtgcacgtttgttatatgggtaaacgtgtgccaaggtagtttgctacacctatcaacccatcacctaggtaccaagcccagcaggcattagctcttcttcctaatgccctccctcctctctttttgcagactttttaatgcaacgtgtacatctttattttcaaaaactaagattatgctctgtttatatttttgtaatgtgcttttttcacatgtcaatatattgtgaacaccttttcacatctatgaacgctattcactatttttggtggcttatattggttagttgaacaataatttctctagccagacctctacggctggatacttagaattggaattggcacactggtgacaagccaaattcggccccctgacattacaggactacacacacctggctgcgcagtgtgcagtttactgtagggagcactccacactggaacaaacatgaaaccgacgtcctcggagtcgtgcagggcatgacttgcacaacagcgcctggaagtcccagtccgaagtttggattgggtgctaacatttaaagatgcaaaggtttcacctaaaaatctagctttcagcttttcttgacaaacctgaagatccagtaaccttgggtttacattcctgcggagtaacaaggggctatgattgagctgcagctgcctgcgtggatgggggcagggggaggtgcactacccagggccctccagcccccagctacccaatgaacctccctgccgtcctttccttagctcctttacgttgtctgttcgcttcctgtgagcatttgcttttgccacccctgggtgacactgttaaacgtctgctgaaggagtcattcttcaaagtcacaatagtctgcagagagaagttgcttcctttatttcattcaaatagcccagatggggagttgctatggcaactctgggaccatattgtagatcgcttcagggaggatcacagagcatcctccaagaagcaggccctcctcccccgagcccgcctcccaccctggctccacgggtagtaacttccagcatggatgcggtcccagttgctactgaacagagaataaagaggcatgcttgtagaacagaatgttggctctgaaatggcacaggggtcactgagtaccacaggctccggttccttccctacaaagcattccttttactattcacctccccatgcattttatattttgggacaattgtcttccaaacaaacttgatttagga

SEQ ID NO: 2174 - DNA, 1655 bp, Homo sapiens
atgatgaaggatgatagatgtgtatcttcctggcctgtggactctcttccctctgcctgcactgtcttcatctgtttcgccttcctggaggactcctacacacccgtcaaggcccggtgtgaatgttccctctgctcggatgccctccttgtctttgtggtgttggtgtcccgtgtggtggtcgtgtgcatgtctgtttcttcaactccttggcgaagtcctcctggagagagggactttgtccctttggtggtggtatccttggcggggaatccccatccttcatggttagatggctgccaatctctttcccccatggatgacgtccggttgtttgccttcgtgcgcttcaccaccggggatgccatgagcaagaggtccaagtttgccctcatcacgtggatcggtgagaacgtcagcgggctgcagcgcgccaaaaccgggacggacaagaccctggtgaaggaggtcgtacagaatttcgctaaggagtttgtgatcagtgatcggaaggagctggaggaagatttcatcaagagcgagctgaagaaggcggggggagccaattacgacgcccagacggagtaaccccagcccccgccacaccaccccttgccaaagtcatctgcctgctccccgggggagaggaccgccggcctcagctactagcccaccagcccaccagggagaagagaagccatgagaggcagcgcccgccaccctgtgtccacagcccccaccttcccgcttcccttagaaccctgccgtgtcctatctcatgacgctcatggaacctctttctttgatcttcttcaaggtcctgcctgccatcagatccgaggtgcctcctgcagtgaccccttttcctggcatttctcttccacgcgacgaggtctgcctagtgagatctgcatgacctcacgttgctttccagagcccgggcctattttgccatctcagttttcctgggccctgcttcctgtgtaccactgaggggcagctgggccaggagctgtgcccggtgcctgcagccttcataagcacacacgtccattccctactaaggcccagacctcctggtatctgccccgggctccctcatcccacctccatccggagttgcccaagatgcatgtccagcataggcaggattgctcggtggtgagaaggttaggtccggctcagactgaataagaagagataaaatttgccttaaaacttacctggcagtggctttgctgcacggtctgaaaccacctgttcccaccctcttgaccgaaatttccttgtgacacagagaagggcaaaggtctgagcccagagttgacggagggagtatttcagggttcacttcaggggctcccaaagcgacaagatcgttagggagagaggcccagggtggggactgggaatttaaggagagctgggaacggatcccttaggttcaggaagcttctgtgcaagctgcgaggatggcttgggccgaagggttgctctgcccgccgcgctagctgtgagctgagcaaagccctgggctcacagcaccccaaaagcctgtggcttcagtcctgcgtctgcaccacacattcaaaaggcacatttgatatagctctttttctgtttttccttgctcatttcgttttggggaagaaatc

SEQ ID NO: 2175 - protein, 195 aa, Homo sapiens [sequence omitted]

SEQ ID NO: 2176 - DNA, 1699 bp, Homo sapiens
ggtccacaggcctggggtccccgcgcgctctccgtccgcagtggaagccgccgccgcgctcgcagcttgcaggcaccgcgtagccgtcgccaccgccgccagcccgtgcgccctcggcgcgtacccgccgcgctcccatccccgccgccggccaggggcgcgctcggccgccccggacagtgtcccgctgcggctccgcggcgatggccaccaagatcgacaaagaggcttgccgggcggcgtacaacctggtgcgcgacgacggctcggccgtcatctgggtgacttttaaatatgacggctccaccatcgtccccggcgagcagggagcggagtaccagcacttcatccagcagtgcacagatgacgtccggttgtttgccttcgtgcgcttcaccaccggggatgccatgagcaagaggtccaagtttgccctcatcacgtggatcggtgagaacgtcagcgggctgcagcgcgccaaaaccgggacggacaagaccctggtgaaggaggtcgtacagaatttcgctaaggagtttgtgatcagtgatcggaaggagctggaggaagatttcatcaagagcgagctgaagaaggcggggggagccaattacgacgcccagacggagtaaccccagcccccgccacaccaccccttgccaaagtcatctgcctgctccccgggggagaggaccgccggcctcagctactagcccaccagcccaccagggagaagagaagccatgagaggcagcgcccgccaccctgtgtccacagcccccaccttcccgcttcccttagaaccctgccgtgtcctatctcatgacgctcatggaacctctttctttgatcttcttcaaggtcctgcctgccatcagatccgaggtgcctcctgcagtgaccccttttcctggcatttctcttccacgcgacgaggtctgcctagtgagatctgcatgacctcacgttgctttccagagcccgggcctattttgccatctcagttttcctgggccctgcttcctgtgtaccactgaggggcagctgggccaggagctgtgcccggtgcctgcagccttcataagcacacacgtccattccctactaaggcccagacctcctggtatctgccccgggctccctcatcccacctccatccggagttgcccaagatgcatgtccagcataggcaggattgctcggtggtgagaaggttaggtccggctcagactgaataagaagagataaaatttgccttaaaacttacctggcagtggctttgctgcacggtctgaaaccacctgttcccaccctcttgaccgaaatttccttgtgacacagagaagggcaaaggtctgagcccagagttgacggagggagtatttcagggttcacttcaggggctcccaaagcgacaagatcgttagggagagaggcccagggtggggactgggaatttaaggagagctgggaacggatcccttaggttcaggaagcttctgtgcaagctgcgaggatggcttgggccgaagggttgctctgcccgccgcgctagctgtgagctgagcaaagccctgggctcacagcaccccaaaagcctgtggcttcagtcctgcgtctgcaccacacattcaaaaggcacatttgatatagctctttttctgtttttccttgctcatttcgttttggggaagaaatc

SEQ ID NO: 2177 - protein, 142 aa, Homo sapiens
MATKIDKEACRAAYNLVRDDGSAVIWVTFKYDGSTIVPGEQGAEYQHFIQQCTDDVRLFAFVRFTTGDAMSKRSKFALITWIGENVSGLQRAKTGTDKTLVKEVVQNFAKEFVISDRKELEEDFIKSELKKAGGANYDAQTE

SEQ ID NO: 2178 - DNA, 1882 bp, Homo sapiens
ggtccacaggcctggggtccccgcgcgctctccgtccgcagtggaagccgccgccgcgctcgcagcttgcaggcaccgcgtagccgtcgccaccgccgccagcccgtgcgccctcggcgcgtacccgccgcgctcccatccccgccgccggccaggggcgcgctcggccgccccggacagtgtcccgctgcggctccgcggcgatggccaccaagatcgacaaagaggcttgccgggcggcgtacaacctggtgcgcgacgacggctcggccgtcatctgggtgacttttaaatatgacggctccaccatcgtccccggcgagcagggagcggagtaccagcacttcatccagcagtgcacagatgacgtccggttgtttgccttcgtgcgcttcaccaccggggatgccatgagcaagaggtccaagtttgccctcatcacgtggatcggtgagaacgtcagcgggctgcagcgcgccaaaaccgggacggacaagaccctggtgaaggaggtcgtacagaatttcgctaaggagtttgtgatcagtgatcggaaggagctggaggaagatttcatcaagagcgagctgaagaaggcggggggagccaattacgacgcccagacggagtaaccccagcccccgccacaccaccccttgccaaagtcatctgcctgctccccgggggagaggaccgccggcctcagctactagcccaccagcccaccagggagaagagaagccatgagaggcagcgcccgccaccctgtgtccacagcccccaccttcccgcttcccttagaaccctgccgtgtcctatctcatgacgctcatggaacctctttctttgatcttctttttcttttctccccctcttttttgttctaaagaaaagtcattttgatgcaaggtcctgcctgccatcagatccgaggtgcctcctgcagtgaccccttttcctggcatttctcttccacgcgacgaggtctgcctagtgagatctgcatgacctcacgttgctttccagagcccgggcctattttgccatctcagttttcctgggccctgcttcctgtgtaccactgaggggcagctgggccaggagctgtgcccggtgcctgcagccttcataagcacacacgtccattccctactaaggcccagacctcctggtatctgccccgggctccctcatcccacctccatccggagttgcccaagatgcatgtccagcataggcaggattgctcggtggtgagaaggttaggtccggctcagactgaataagaagagataaaatttgccttaaaacttacctggcagtggctttgctgcacggtctgaaaccacctgttcccaccctcttgaccgaaatttccttgtgacacagagaagggcaaaggtctgagcccagagttgacggagggagtatttcagggttcacttcaggggctcccaaagcgacaagatcgttagggagagaggcccagggtggggactgggaatttaaggagagctgggaacggatcccttaggttcaggaagcttctgtgcaagctgcgaggatggcttgggccgaagggttgctctgcccgccgcgctagctgtgagctgagcaaagccctgggctcacagcaccccaaaagcctgtggcttcagtcctgcgtctgcaccacacattcaaaaggatcgttttgttttgtttttaaagaaaggtgagattggcttggttcttcatgagcacatttgatatagctctttttctgtttttccttgctcatttcgttttggggaagaaatctgtactgtattgggattgtaaagaacatctctgcactcagacagtttacagaaataaatgttttttttgtttttcagaaaac

SEQ ID NO: 2179 - protein, 142 aa, Homo sapiens; identical to SEQ ID NO: 2177

SEQ ID NO: 2180 - DNA, 69379 bp, Mus musculus
  misc_feature (1)...(69379): n = A, C, G or T/U
aggcttttttgtttgtagtcaggaaggaaggttttgtttctctaataccaaggctgcatagccactgtaagcagagtgtgttttcaaagagcaaggcgagaagcgtctctttctacaaaggcagtgtcaggttctgtacaacgtgatgtgagtgcatgccagcattcagggcgctcagagatgaatccagaagacagacacagaaatccttagtcaggaatgctgagatgatttgcctttaataaatacaaatctgactttcaggggacggagaggtccactaaacttgtatatgacagatccatctgcgtgtctgatgtctgtggacaagaatcatttgtaactggtggtgtggctaacataatcccaacacttaggaggctaatgcaggaagatcgctgttaatttaagtctagcctgtgctacagagtgaaaccttatctcaagaaaagccacaaaacatgaaacaaatgtgataagaatctttgcactagcaatctgagagagaactttacagaaccacaaaccaaaaaggtgtcgcagacaggcctgttgctttctcaagataccccaatgagatcagaacaggtcaccccaaaatacacctaaggttgagtttactttgagccaaaggtcactgagaaaagaagctttctcagccttccctactccctgcctagtgacagtgacgtcatgcctagtgacagtgatgtcaggactggagacttcagactccttcacccaggagagtgcagaggagcctcccgtgcatttctgggagcacagttgacctgtctgacctgctgccttgaaccccaaaacagctttcctttgccctgcccttctgcgtgtattcttcattggcggtggtagagaagccggatttgaagcccttcttaggtttcctgtcagagtcaagggaggtacgtgaagataaatggctgcctgtttttctcctgccagtctttgtctcagggctccagcccagcccggaggagggggaagggaagggctttcttcctctcctgtgtccccaccctttggacccatcccagcgttttcacaagaagatggagagcggaaggatcctcctcttggccttgtgaatcacactctgggagccaggaacctctaaagtaaaaactgtagggagagagagacagtttctggggcaggtcccccccaacagtcaacaaatgttccctggatctgaattaaacttatttatttttcatttatttattttgtttttccggaggggacaaggtgtctgcatagccctggctgccctggaactcactctgtataccaggctggcctcaaactcaaagatctgcctgcctgtgactcccgagtgctggggttcaaggctcactaacgtaatcccagccaccatcaccctgctatcttttgttactgagacagggtcttactcgctagccttggctggactgaacttgctatgtactaatggcctgagtccaatcctgggccctacatgtggaaggagaaaaccaggactagggtgttgtctgactgcgtgaacactgtggcatgtacacacacacactcacaggttaaaaatcagcagcgctgggtgttgaggatggagagagtgagggtggagagagtgagagtagctatgtagaagaccccgtcgcaaaacaaaacaaaactaaacgtgccaaatgtgtgttctctctctgtctctgtctgtctgtctgtctgtctgtctctcagattggactaagttaacaaaacagttcagtgtgtctgtgtgtgtgtctgtgcatgtgtttaggccagaaggacaaacttgggtgtcattcctcaggagccatcccccttgtttctggagatagtgtctctccctgtctccctgatctggagctcaatggcttgactggagtagctggctagtggaacccagggctcctcctgtctttgtccccgaacccctcccccagccctggagatccagacatgcccacaccaggctgccgtttacagggatgcggctctcatcctcatacttgcacagcgaccacttgaccagcgaagccgtcctgagcccagccctcgctcaccatctctagcagcggtgtctgatctgccaggcatgtcccctcccctagccgagcattgtaaaggggccaaacaaagctccatcaccaagaattagacttgatttctaaggtttcttccagttttgtgactgtggtccgtccgtctcattgatttctctgagggccttggggctgaggccctctttttaatgtgtatgtgtcattgtgttggtatgcacacacgtacagtgcttccaggagcccctaacgctggagttgcaggcagctgtgtcttacctgatgtgggtgctaggagccaaacctgggtcttctgcaagagcaacaagtgctcttaagggctccccagcccagtaccccataatggtggcgctggcagaagtgacaagcagggttttcttcccataggtgactcttgtttattcactagacaaacaagaactagtccccagcagagccctcctgtgccctccaccgcctcagacagcccatggaggttccattcagctgtagagggagacaagactgagtgcactattggccagcatagacagaaaggttcacagtgccctgtgctgacaaggcagactcttaaaaaggtttgttatctctccagagaatgctagcaagaggactccccagaatgtgagtgtgcacaccctttgcccagcccctgggaactgatgtgtctaaagacttctgtttgcttaaatgtgtgcaccggagtgctgatgtaccaccagccgcatcccgtgtgcctgtcagcatgttagcgtgttctgctccctccggggtttaggcaagtcttaaaggcagccgttgtcatgagttgggatttatggtcctcaggatacattaattctatgatataaaactgtgtttgtgtgaaaagagatgagggatacacatgcttatataatcttagactgcctatgggaaagatgtaagcaacatgcttatatagtcgtagactgcctatggaaaagatgtaagaaacaagcctgaggctggagagatggctcattgggtaaaggcatttgatgccaagcccagcagcctgcattttggtcctcagaacccacatgagctaatagaactgattcccttgggttatcctctgacctctatacttgctgtggtatacgcatgaacacacacagatttttaaaaagggaataggcctgtaatgtcaactatatatgtgtatatatgatttgatgtctctataaaacctaggggctggagagatgactcagtggttgagaaccacttgctgctcttggagaggacaagggtttgattccctccacccacatgatggttcacaaccctccttatacccgctccaaaagatccatcgctctctcctgaccttgagttccaggaacacagtggtacatatacatacattcaggcaaacactcataaacataactatttaagcattttttaaaatccaggatctacaaatgagagaaaacatgagatgtctaccttcctgggaccggtgtgactcacgtttgatgtgactccattgtatgtatccatgtctctgaaaatggcgtgactttgttctttatgactgaacgcaattccacagtgtgaacccacatcatccttagccatcctcggttcttgcacacccagagggtccaggacagcgttgttaacagtgccgctgtaaacttgtgtacgtgtgtctgtgacaggttgacatttgagtaatgagtggtgaggacttccacacaggcagacaagccctcgttgccagcagtacataaggacttcctattgtctacatcctcgccagcacttcttgttttcttaacgactgccattctggctgggatgagatgaacttccactctctgagttcctcagatggatagcaaggttggacattttcttcatgtgcttattggcctgcttttaagagtttatttatttatttatttttaaatattcatttattatatgtaagtacactgaagctgtcttcagacacaccagtcagatctccttacggatggttgtgagccaccatgtggttgctgggacttgaactcaggaccttcagaagagcagtcgggtgctcttaaccgctgagccatctcaccagccccttatttatttatttatttatttatttatttatttatttattggttttttggtttggtttggtttggttttgattttttcaagtcagggttttagtgtagccctggccaaacacttgagcaggtcatctcagaagagtcattcccagcacattgccctgtactagctttcatgagtccacagtgaagctttgatcacatcgttccagaaagacctcgattaaaaaccacagggactagccggccagtggtggcgcatgcctttaatcccagcacttgggaggcaaaggcaggtggatttctgagctcaaggccagtctggtctacagagtgagttccaggacagccggggctatatacagagaaaccctgtctcaaaacaaacaaacaaacaaacataacccacaaaaacaccacagggacagcagcagtcagagcttctgctccctgctggtgtggacacgacactgccccaaagtgccccacacctaacataacctgaagtccatgaagtgcagggcagataaataaacttctgtctgttgggcagcagacattgtaggcagtcatgaaaacgcagaaatgctctaaagtaacaagaaggtgacagcatgaatcacccgatgtgatgttacgtagaagaagcaaagtgccaagaatgcacatggcattcctgtcgaaaacgtgcaaaaatggccttaggaaagccaaggctgttctagctccattgaaagggaaggtgcaggaaatagttactctgccttgtggcctgggtgctgggagcagagtgtttgatgagaacccatctaggcactggattttatagcccctgtaaacaaatgctggggaaacagccctaaagacagcactgtggggaagcagagatgtgctctggaaagctgcctgggttgtttgacatttcccactgggttgtgggggtaaatttgtcaacagccagattaggaaggcctgatgactgaaactccacaccctacagtgttgagcaatgccccggaagccaaaacccgaagtggggcaatgtgttcctcaaatcttttgttctgggctcttcacctcacccgtgggcagaggcttctgggagcagccagcatggtggcttaggtgctgggtgagatgggtccttggtggaatgggtgcttagaaggttaggtacttaggagggcaggtgtttggttggaccatgcatgcttggggctagaaatggctgcttactgaaagctgagcctgttcttgtcactctttctgtcatgccccactcactgacatgtcccttaagagtggactgcagtgctctcctgcccagccacctgtagaatccctccccgcctccccccgaaacatttcattccaatcccaaaattctctgcctttcagcccgtcatctctggtcacttccattctttcactttttagcctcacagagggtagggaggtatgttggaaccttagccagctcactgtcctagatacctgttgtctgcccctcttctgcaagagcacccctgtttcctggaaatcacctttctctggcaccagtcagcaccatggggctggcacacaccactctctagactcatccagtctggttgtcctggtgagctggcttcagggacaggctctaaggatggctcatttccaccaaattatgggattttgctggaagaatcaaaagagaaaacccctttggtccactgggctgccaaggtgagacaatataagcctggagctgcttgaggccagtgtgtgagaagaacctaatctgggagggaagttgatctaggcagtgtcttagttaggaatggtttctattgctgggataaacaccatgaccaaaagcaactgcattagcagcacatcactgaagccagccagcaggaacctggaaacagggactgaaacagaaaccctggtggagtgctggttactggagtgctggttactggagtgctggttactggagtgctggttactggcttgctcctcctggctcactcagcctactgttctggagttcccagaagcacccgcccaggggcgtcacctcccacaataacctgggcccttgtgagttaatccaaaactgccgcacaggtcaatctggtggggatgttttttcaacggagattcctacttcccaaatgactagcatgagtcaggttgccataaaactagccagcacagtcaaggcaggaagagatgggttttagtggtatcttttgtgcagttagagcctgctgggcttttaaattatgggaccccacagatgcctcttcaaagggtaccccatagagtcaagtgtttgaatgcttggcccacagggagtgggactattaggaggtgtggccttgttggagtaggtgtggccttgttggaggaagagcatctctatgggggtggatttgaggtttctgtgcttaagctctgcccagtatggaattccagtctcctcctggctgccttcagatcaagatatagacatcttggcaactccagcaccaagtctgctgcacacggccctgcttcctaccacaacgatgatggactgaacctctgaaactaagtcagtaaaatgctgttctttataagagttaccttggtcattctgtctcttcccagcaataactccctaagccccgcttatagggcacaaaagaccctaataaccatcctttaagggaaagaatcctggcagaccccacctgtcagtcagagttctccaggggagcagaacagaatatgggctacagaggaggtgtattagatcgccttacgtgacaggtgctggacagcctaacagtgcccatctgtatgctagagaggcagagaacttggtggctgattagtccttgaggtgacactgaaggctgctggcctgtagtccatgtttgaaggacggagaagctgggttctgatgtcagcaaaggctggtggcagcaagagcacagatgtgctcaccagcaaggggcagaggctaaaccaacaccacttctccccctgcatcttatccgcccccccccccccatagaaggtgccaccaaccctgggaggagggctttcctcctaagttaatcctttctggaaataatacccttacaccagatcagaagttggtctcttagttgatccccgatccaagcgagctggcagccaaggttaggcaccctgcctttgtttggagatggcgttctcaccacagccccttatctgcatatccacaacaggaaataaagtaaactagccatcaaataaagcaaacaagttttgacattgttgcaggttctagagggagcctcttgtcttctcaatggaaagaattcagtcaagagacatggacagtttaagtaaaaatctattcagcaagtcaaagctatacttcagagaaagattggagtgggatgtccaagtgggtccacattgtggttttaagggaagatcttaggattatttactttttttgttttttttttgttttgttttgttttacaagacaggatttctctgtgtagccgtgtatttacttatttttatttggttttggtttttcttttcaaagatttatttatttatttattatatgaaagtacactgtagctgtcttcagacacttttcttttcaaagatttatttatttatttatttattatatgaaagtacactgtagctgtcttcagacactccagaagagggtgccggatcttgttataggtggttgtgagccaccacgtggttgctgggatttgaactcaggaccttcggaagagcagtcagtgctcttaaccactgagccatctctccagccccctggttttggtttttcaagacagggtttccttgtttagtattggctgtcctcaaacttgactcaaactcacagagatccacctgcccctgcctcccaagagcagagatcaaaggcgtgcaccacctctgccgggccgattttatgattataaggtatgatgtctcttttccattcccaaatcatgattggccaaatctcccttttaggatatacccatgatcctcttgaagagcccacagagaggcacaccaccacaatataaatgatagcatgataaagtgggggtcttctgaagatgcagatctttgttaatgcccacatgtggcaactgggaaagccctatggtaccttagtctctgacaaaatggacaacctatctgcacattcaaggatgtttacctgcagaggaacatcttgaccaccggagaacatagctaccaagacacagcccagcctcctcattatctagctccttgtgtctcgtgtctcagcgcttcattttcagaggggccaccgatatgatctgagtcatccaccctgagtacttcctaggttgacaccaagttcacttgtctgtggcttgcagaaggttcttcctcgtttttaaatgtcatgtcatctgcctctgtccaacttcctgaggaggtcagaggcctattagaaggcagggcaaatgccactaaatctcatgaggagaagtagagttcctcaatatggaatgggatcccttagtgactacatttgtcttcagtgctccccaacagctgtctaggtgaggtcagggttacagaacttggtacctagtgccatcttccttctctgaaacaggggagggttcctttagccccggcactgtcccctcacattctacaacttttctgagccttatctatagtctgttggactctgttcagagcagctgtccttagtgtccacacaaggatgagggctagcacccaccctttccctccagagctggcaccaagttctcacacgcagacgtctaggtgtgagaccttctcctggggtggccacgtgtccctaaactttccaagaactttagctcccagcctttcctaaggctctcttaaactttcccaagaagccttagttggacagatcttcccatctgttgtcagcaaagggcaggtgctcggttaccaccatctatatcatcttcctgattggcagaactccagccccctgcctaaccctcaggacttcagaaaaatcccagaagttcggccttggttttctttagttttccttttcctccctggtgctgggcatgggagtcaggaccttgaccactcagaggcagtgacccgcccctgagctccaccccccagcctctttgttatttctttattgaagagatgtgggagaagctgaatggctggacgttgtgcttactcctatttatgaaaagagccaaatctactggcctcttaaagacacgcctttcggaagacaaacgggactcagctggccactcgcgccttcaaaggcgtgtgggtccacgggacctacgctgggactctgctaccccaggccagaccagcctcgagggtcaccttcctctcccaaaccacttttgcgcgcaaaaacgccgcgacctagtcatcctctgctggaactctgttcctgagcgaacccgcgcggctgtcgggaggcgcagggactaaggggcgctcccgcgcctgcgtacaggagctgagcgaggcccggcgctcccagcaaaagtgacagctcgcgagtcacgtggtgctctggaggcgtggctcccggcttgctccagagaactcgtacgtcacgcgggggaggagggtgggactgggcgtggcgccccctgttgactgacaactctctccgcgacacatccaaaaggcccgactgctcgcgcgtcacgtgcacctaaaggggcggggcgctcccgctgactgacagcccgctccgccgcgcctcagaaggacccggcacggctggtcgcgcggtgcatccgcggcagctgcagacccgacggcgtcctgcccgcccccctgcccggtcccgcgggccgccgcggcgagagggcctcgggctgcggtgctgcgctcgcgaggggctgtgcggcgtggctgcgccgggaccggtgaggaggggtcgctggcggcgtgggcgggtcggctggacggccggtgcggcgggcagggctgtcattctgctggtctcagtggagggccgcgagctgctcagaggccacgaccgcgccggagcgggctgggaaggctcggaccccgaggccgcttctaggatttgggaagactcggacccagtcatgcacgggtctgcgctcgcccggagttgcagggttgatgagacgtgggaaggtgacaaggggaggaggaagcaggctcggcggtccagtccagtgccgcacacgggtgcgacctacggagtgagcgggagcgcggctctgccggcgcaggtgcgctggcacgggctgggcccccgacgtggagctgtcccggtggtgagtcagaggtagaggtgagctggcagctggcaggccgggctaccctcgccccagctgggatccagcctgtaacccgatgctgaggttctgattcattcccttcgatctgcctccctcccaaatcctgaaagcaggacagcgacacagcatgaaccccaagacagggcaaagaggctcgggcattagtgagccgcatcccttccctcttttccacactgtggtcagaagtagggatgtttaggcctttgaggaccaagatggcagataagctgttttgacgggctccgtggaaaaagttgacacctgggattttcttttcccctcaaacactggtgatttctggttggtgatgatgagctagctcagtctctgttgcaatccagaagtttcttgggatggttgtcttttggatggtctgtgtcagctcatgtggagtggactcctatctcttgagaatgtcacaagtatacgcgcatcacaaatcttaaagaaattgaagtgagttatctccgcagatgctaaatgcattctatcttcatggcaatgtttgtttcttccaaggtaagtggttttagaataaccccaaatggcgctgagggagcttctctgaggacagcctcccaaccccctgcgcccctagagagctattgagtgggcaagtcatgtgaataccccggctttctttccttttctcccttcttcgtcttcctttcacaagcggaaagtcatcgagttaaaaggaaacgtcaaggggctgaagagacggttcagccagcccttgagagcatattctgatctttgagagctccagagttcagttcccagcacccacctcagggggctcccagccacctgtaaccctagcctcacagaatctgatgctcttttctcgcctcctcaagcccctagtcacacgcatacaaaaaagttaaacaataaaaacaactaaaaaatgaaatttcaaaagccagatgcaatggtatagacttgtacttactattagtactccagaagcggagaaaagagtgtcatgggttcaaggtcaccctgggcggtataacaagaccacgtctaaagagaggaatggaaagctgaatgacaccccacttcaggatgacaataggagaatgacttctcctgtcactcggttctcttgctttggtagcttccagagtactttcaacaggatctccttgttcatctccaccattaatttgggagtggcaagtatcattcctcctgtgacacagatgaagaaaccaagcctcgcttgtccagggccacttaactgttggaggcaaagaaagctccacaatacctttgttgctaaaagtgctgggtatagtagctcatcacccaagaggacgtgagatgggcatgagcagctacgcttcctgttgggctggagggctgagtggagtctccttctctgctctccttgcctcactgacagtcagcagggctggccaaccagcatcactatactgttacctctccctataccctctgtggcaacgcagatttgtttctaggctttgagaaagccagtaggaagtgcattgcagagtatctttgctcaagtgcttagtttccaaacaggtcaggtgtcctcaactgtgaagcaagacagcatggccggtccagggagacctgccccaatgattttcttttccatctcccgaccagagagaagcacggtgaaatccatggagctgctgctggctctgctgcgttcacctagatttgggatgtggcattgtttgaggttttgtggcatttttttttctatttttagcatacacagctgctcttgttagggaagaacaagctttttatcccattctctaaatctgggcagcaccacagaactgcagggggttactttatggctgtctctgcaggtcagtggttcaggccagaccaaaagctaaaacagtcgtgggtacatgtatcaaagccaaggtccgacctgaaaggtttcctttactccgtgcctccagggactttgttcttttctggatagcacatttaatgaaggtcacaggaagccatccagagaactcattgtaagttgctacagaggtgcaggtaagccaggaacatcttgatggccagaattacagaacatgcagggctgttactggtaagatcccaaggagcaaaggacaaactgtgcggttagaaaggcttgtttggagaatgccatggtctctcatgatgaagttcagacgtcttctcttaggctgccaggtgctgacacgggtgctgactggtctcgcctgaatctccagtgtcagcagctacccctgtcactcccagaagtctcttaagcaagcctagtttgctgtgccacagggcctgtgcactggttgttcctccttccagatttccttgtaggcacctccctgtcattcaggtaaccactcctatgtcacatgttaagtgagcccgtccctaagagtcaaaacaaccttcctgtttcctctggtccccagcccactctcttcagcacatggcagtattctttatctgtattagaaataaccttgttcctttgagaatatttttattatctgcccactgttcgctgctgtatcaacacgttgggaacagtggttgtcttgtagaagtgctcagtgcatacttactgtaggaccgtttatgtcagagcctggcaggatgggaggaggcactactgaggtggacactgaatcggcttctcttatgggagatagcagcttagcagctgaccagtgggcagaagagttcaggcatggtggatgggaagagaagccaagtgatgggttgtgtcagtctcctggaggagctagctataataaagctcaataaaccacgtatctcaatacaatataaatgtattctctcagaggctcacataccagaagcccaaagttgaggcaggaatagggcagtttccttttccttggttcagactccatgtgtctttcagctgctgctggttgctggtgagcccaggcatccttcccttatagcagactcactctagcctctgcctctgtggtctcatcttgtctctgggtcttctcttataagggcacctgttaggctgcatttggggtccattttatcctatcgcggtctcaatcagtcacatctataactgtccttttccagataaattcacactcacatatctggggataaacttcaaatgacatttgagggtgggcatgattcaacttaatgtcttccagctacaagatctagtgatctctaagttggatgcagtggtgctcacctagcactcgggaggctgaggcaggaggattgcagcaagtttgaggccagtttcatagaagttggaagtcaggcatggctatagagtaaggccctgtttcaaaacactaacaagcaaataaacaaaaaccaaaacaagccaacaaacaaagccaacaacatatagtgacattttaacaggacagattggtggaaggtgcttggcagtgcttaggattggtgacagtgatttagatgttttcctggaaagcgtccatgatcctcccatcttcaggggaaggatacgctgtgtgctacaccgaaggtcctgggacagggtttcctgcttcggctttttgctggattatgtccaatggagtagaaatagcttgtcagcgtctagcaggtaaagctattccatccctattccgctcactgtggacttcacacctccgcgtggaggaggtgctgacaccggggaagctgtgcccttcctctatcattcccaaagacagccactgagcctgtagggacatgcagtctctgaccttgacccttgactaagtgtgaactcttcaggagctcctgccaggatgggttgtggtttcgtggtgaaggaaccttgcccttctctcactggctctctaaatcctcatcttgttttgcttagtttgttttgagatgggatcttgctgtgtagcccaggctagcctattgctcacaatcccccctcagccttctaactgctgggatcacaatgtccaggttgctggagttttgttggttggttggttggttggctggttggttggttggttggttgtttttggttttgattaggtaacccatgtggctggtatcaaattcaaaggcataccaagatgacagtgaaaagctgcttcgatcattctgctgccttccccacctccacgggcaccattactgtcagcatcttggggctccttccagagacctgatgctctttttaggtttgcgttcccagtcaccacagggctgttgttgtctctccttccagccttctttcctcctgccgcttctgtgcccagtggactggcttgttcccatgtattcagagatgatgacaccatccctgccaggagttctatattgggaaggaaagtgctagaagagatgatttggtggtgccacatttgagacaaaagtgaggaagtgcttctctgggaggggttttcagtgtcctgtttcttcaacctcattagctaggttagtgctgacaggggtgaggaacgggacccagggagcagggtcagctgattttatgttccaagggtgtgaaattatccagagccttattctagctggcgattattatagggtacatctgccgtgacaagcatcgtggtcagctttatggggttgtcatgtcaatccccacaaaagcagtctgagtagtctctggtaatatcccaatttacagtcgagactctaggtatagaagagccaaaaaacttgcaaatccaggttccctggctctgaatctggctcttcggctagtctaatctgctgctgccctgggctgagccaccagtgaggcccctgttagtgtgcttctgacagtgctggagactacactggtcctctgctctctgtgcctgggccttcctggagccctgccagccctggggtttagtctctaggccttatagacccctccccatcaagatcactgtctccggggctgtgtgcctgctcaggtgagccttcacccacccctcacactcgtttgcctaccctaaacacttcctagcactttggggatgcagaagtactgagggcagaaggctgaagtctgcttgaaagccctggcctctgagagcctggctgccatcttactgcccagttccttctgtgaaggtgcttagctctcggcttcagacctgagagttcactcactcctcaagaggcttctgccttccctcacccccttttagcatgggctttaaatagcctcctccctcccctctttcttctctgtttcctcctttctttaggagcttgtcgaagtacattttacacattatagaatctacccatttcacgattcagttatttttagtaacgctactgagtggtaagaccatcgtcatagtctaattttagaccatttccatcgcccccaaaaaagcaagtcactagtgatagcagttactctttgtcctgtccctcacccaggagccactgttttatgtcctcgtcatggttttgcctattctgggcactgagcaaaaggtggtcctttgtgacaagtgttgtttctagttaaaccctcttggagcatggtgaagcatggaccagtctttcctcccattcagccattcttttgtcctgagaaagtgtggtgccttctgtccctctgtcttccagcaccatctgctgtcttacagatctgcctccgctgtgggagagcaggtgagtgagggcgcccttaatgttctcactgactcagctgtagactttaatttgggggtggggattccatctatggatctctgactggtttgaacccatgatcctcctgcctcagcttctccagtgctgggatcacaggcaggtggcactagcctggctcagaccttgtttgaattgcataaacttgcccatgaaatcttcttcctgtcccagggtcctagttaggctttctgttgcatttctgtcatagtctcctatgctggagcccctctctggtctgtacacacacacacacacacacacacacacacacacacagagagagagagagagagagagagagagacagagacagagacaaagacaaagagacagagacacagagagacacagacttacacacacacacacacacacacacacaccccacacacagagacagagagagacagagacaaaaagacaaagagacagagacagagacacagacatacacatacatacacacacacacacacacaagggagagagagagagagagagagagagagagagttgggtgtgcaaaatccattacagggcaggggttgttttgctctcagttactgcccccgtccaggctattgtgctgtgtgccgaacataggcaggggctcctacccagccaggtgtgctagagatatttccctggcctttgcatttcaggcattattcacagcagatgagtcacagctgcaaaatggccactgagctcgggggggactggagcacaggaaagagcagatctagtgcagatggaaaataccaaagtagtgaagcacagtggctgatttgatccaacgtgcttgagttgggaggggtgagcaaaaactggggtgcaaagctggggttcctgagcaagggatgaaggctctgaaagaacaagaacccgttctgattaactataaatattaaggatgaagacttaaatgtaatccaaatagcaccaaatctgaggtgtcctcccctgggattttagtttggggtgatccaaaggagatgggaagacagctaataaccaatcaagctcagtgctgcttctactctggggtccagagcatgcttatagctaggcatggtggtgcatgcctgtaaccctggcactcccagggctcagggctgcaggactagggctagtgcctcttcctggtagtcctaaatttgttctgctaacatgcagcctgctccatgagcctgggtcattagcctagcttccaggactagcttaaagccctctcagccccagttcctgctccaggcttttgcctcactgttggctacacaggccaatcctctgccttctcatgctggggtctccctgcccagccagtccttctcactcagtacaattcagcagaaattcaaggtaagccacatgggtaaattgttctagaagccacagtaagcatccaaagataatagaaatagtgaaatgaatttaagatttctatgtagtcagtattctatgtaaccaacatttccacatgatatagttttttaaagggctatttatttttatgtgtatgggtgcttgcctgtatgtatgtatgtgcaccacatgttggtctggtgcccacagaggccaaaaagaggatatcagatcccttcaagactggaattacaggctgatgtgaaccaccatatattcagatgctaggaatcaaaccttggtcctctggaagtgtagccagtgctcttaatggctaagccgtctctccagtcctagaatatagtcttctggggggtttgttgtttattttttgtttttgttcttttgagctaagatcttattatgtagtccaagttgggctagaactcattatcctcttccttcagcctctggagtactgagattccaggtgactccaccacaaccaccttatgataataattactgagagactttaaactcggtttctttttttttcttgtatgaagttagaaatctgatggccaggacatctcagcttggacaaccacatgtggattgccactgtgaggttcagatctgatctgtttacatccatatctcattcgaagcactaacaatggtgccatgatttctgcttattctttggggcctctgactgaggcagcagctccctgtctgtcttgtccctttcagacaaagcatgtcccactgtaatgcagagtgaattctgctcggtaacccagtgggcatgtggccaagcacataaagaatccactaagcatgtcgaggcagctcagtagtcagtgcctattggtgacttttctaacagggctgcttaatgtccaggcttccttgccaccaaaaaaataatacccactttacccaacagttgtatcaaggaccatcctgattattctactgatggggttttggggaacagcaaaacaagggaagaattcaacgtgaaacaactcaaagggtcggggttctttggagtttctgttgcttaggtctaatgtagatgaggcatgtgtagtgtcacagtggctctaagcacccgacactagacagggaagctcttgctctacagatctatagtgagaaacctggctgtgatcaaaggagagtgatagacagcctaaagatccaatgtgcagtggagagatgccctgctctgttgtaatccatggtgcctggtctgtcacctctggtgacattgggaaagtccttatctaggagcttggcaactccatacagacccacactctcactccctcttgtcccaggttggaggctcccaacctaatgtttcttcctctcagaggactgagcaatgggagcagtctccactgagagcagttgatctgagagaagggaagacacctgtacagtgaactagagctctgctgtaggcagcagaggggctgcgtctgtgcacacagagtggtcctcgcactggttaggtgtcctgagtgctgggttggagggagccttcttccccattcactagccagtgtcacacgcggactcttcgcctccatgattctgaagaacgtgtttatgttccaaagtaagagaaggctggggaccgagcgggtttacctcctgttgtatgtgactgcctgtaagggagttccaagctgattttattatggttaaaacagttgtcagttatatacacgctgacatgtacagtttggggaaatacttgcaaatgtaagctgaagctttgctaggcttccagtgttctttatccctcccagttttccagctaagtctgagtaagtctgcattagcgatatagggaacatcagtccactcgatcttcttgccactttatgctatctgcttttgttgtcttaaatatcttcttgtgtctggcatgcttgggcttctaccagatttgactctgaactaactaactaactctctctctctctctctctctctctccctctctctnnnnnnnnnnnnnnnnnnnnnnnnnnnnnnnnncctccctccctccctccctccctccctctcttctctgaggtcagaggacagccttaggtgtcaatcttcaccttccactctgttgagatggtttgttgttaggcagtgtacatgccaggttagctggcccatgagctcccagggagtcttccctctccacctcccatcttgccgtagaaacactgagattttctgagtgtaaacactgagattttaattgcataccacttctcatggcttttcataggttctgaggtcctcctgctttgaactgagtctctctgcttgtaaggcaaatgctttagccactaagccatcttccccagcactagggaaacaaggctcttaagattccccaggcaaaatcaagctccacttctgtgttgccattagcatctgcatctagaattgtggcatttgtcaggagctaagatacttctggaatgtctctgagtccatttcccatttaccttcgcatccctggggccagcaaggacctaatcaattgttgtcaaacaaatgacctgatctcttcggagtaacacccaggatcctcccacttatggaaaggaagggaagtgacatcaaggcagcagccgtagaacaggcctgctctgtatcaaccagagtcgactgccagtccagagcaggaactgtctttcctgttagtgtttctcagactgtggccaccagcccatccgagtgctgtggctgatggacgggtccttgtttgtgttcatcagctttcactaaggaagctcaataccaaaagtagctggattaaagaggacacaggtttaagtgagaggaccataccatggcaaagcctatgaaaagggaacggtctcatttttagcctttaggataggatgaacagagtcctgatgacctgagtacctctcgttatgtctgcctctggatcattcccaaccccttccatattgtcagcctgtggaccaagcttgtaacaagatggatgtatgccttggaggaatacaaagtctatctagctgtagtgacatccacaatccagcatagcaaggctgtggacgcagccgctgccggctctatttggacttctgcagtagctctttggccccaggcagctgtgtagctttctaagccttaaggactctacactcacagactgacatagcagtggacctggccagtgtggcttagtgcctggagcattgtgagagcacagtgttagttgccatgacgtttaataaccaagaatccctttataactgagaagcccttgcccctgctagaaaagcccagctgggctgccctgacaggactgcaagcagcactggttgcagctggctttgactcttgggaaactggtgatcggtttacgcagcatgcagaggagtgcccacatcacacagtcctggaaaggatgcatgagggtttccttcaacccactcttccattcaaatgcagattcaaaaacgtaaagaactatgactgtttagggtttctacactgagtgacataaaatctttgaaatgtttaataagggaaatttaaagtgctggtacacagctgtagtttcagcaactgaagaggctgagatatcaggaacactaaaatgcttgagttcaagacatgtagtgagacctctccctccaaaaatccataattcaatagtatctcagataccaagtactggtgtgctctctgtctccatttgtgtgtgtgtgtttctaactctctctctctctctctctctctctctctctctctctctgtgtgtgtgtgtgtgtgtgtgtgtgtgtgtgtgtgtgtgtgtgtcatttctgagtctcagaattaacatctccattcatgtcttatattgtgtctttccctctgtgtcgtgtgactctggtgtcgtcccccccaacccaacctctcgtgtgtgtgtgtgtgtgtgtgtgtgtgtgtgtgtgtgtcttttctagctcctggtatgactgagcagtctagtctgatcagcagcctcctctcctccacaccgtgtttcagggattctaacccacaaagtttatttaatctcttgtgtcaagctgtctgaaggatcttgtatggcattttaggaagctgtaaaagcaaagtctgccctccacccccagaatcggtacaggacaccaaattcttagcaaggagatttattactccagaggggcaggaggctgggctgcaaaggcagcagcagaagcaacaaacacaagcaaacaagaaagcaagagcaaaacaaacaaacaaaacaaacaaacaaacaccactcctggggtggaggttttaagaggaaagggcaggccatgctggggtgagttggtaaatcctgatttggacatatctgccgaatcatgaattttgattgttggaccttggtgtcaggaatgactcagtgacaaaataatcaaatagaccttgaaggctggctttagggatgtaacggtttttagcaagggtgaaagggcaaaacctgtccataatgtcttctatgctcggatctgctagagtccctgcaagctgtctaaattcagtatactccagcaagaggcatcaaactggggtgaatcactccaggaaaagcttatagaaaatgagaccgttggggcaggaaggccaggcgtggtctgtcagactcaggccttgctgaaccctgcctgctgtcactactcaggacccagccccagtgtggagcaggtagtgtcagtgcatctcctcctctgccacatagatgcctcccccaaaagattagggtgtggctctggctacttgcctggccgttcttgctcttttctttgagttgctctgcccgactcctgtggaggtatttgatcaagtggaatgcggcaggcaggcacaaacattctctaactgtctccttcgtggagaggcagaggccagttttgtgttgcttatcgctatctgtggctctgactcttgggcaatcagtggtgaaggctctgggtcagtggtgttggtacagggaaggaaggggatggggggacgcctggcacaatgcaggaaatcacggtgaccttctgtgtcaaccaggaagggccatgatattcagggagctgactgggagtggggctcctcccgggagcctgcagcatgcattgttgctcccggtgaagactgaagctcctattgtcccagcggctctagaagcatccgttctcccaccctgagagagtagcactcaaccttggggcagttcatcctgtcacacatcctgtcaacagtccgtggtgctgggactcatctagttttctgtgacacaggagtcctgggggctcctggcacagcttactgcccctgggtcctactcttggtgaggactttctgtgctgccctggactcgtggctgtgccactgatgttgaaggagaagacagccagtgtgggtgtaccctgcagagtgtccaacaggattgtcgcagtggcagcgtgcagtgtgggatctcagaatccagttatcgtcctggcagtaatgcatctagcctgtcaagcgagagggctgtattccttgttagccctgggtcgttggcacttcctgaagaagcctggtgggactcgtccttgtgtccctgtgagttctgcccctcatcctctcactcggtgtctttcttactatgcagtgctacctttcccatgcggccaccttctcggaagttgcctgccctgtcctgttcaaacctagtgtgcttttgagcaaggatgcttcccccacacccccaatggcagaggatgagaagccccagctctcctccctccctcctaatccaacctgcatccccgggcaggcagggaacttatagccgaccttcctggtttccagcccctccccagcttccagaccttcactgagcttcactgctggcatggaaaagcgagactgtaggcggcaacatctttcttctttgtggggctgctgatgacagagcctgaggtgacacagaatctcaaaggaccaggttcgggactgcctgtcagggagagctgtacctgaggtagctcaggacaggggaaacctggggaaagttgggtctgagtaccaaatccagggcccatgtgggtgggcatgtggtgggtgcagctagctgctgtgtctggaatctctagagccccctctttctcttttctcatttttttcttctaaatttattttgtgatgccaggtaagtgctctacctctgctccagactccagccattttcctaagaaagggcaaccgttgaacctgggctgtgtctcaggcactcagctgcttttgctgattctcttccttataattatcatccagtaaagtagacgtgttttagagtaatattttaaaacacatagactcatgcagttactaccaaattcaactaggaagccatttctattatcttaaactcccattggcaatgcccctctccatctctgcccagtaatggcacccctctctctgcctttttttttttttttttaaagatttatttatttattatatgtaagtacactgtagctgtcctcagacgcaccagaagagggcatcagatctcattacgggtggttgtgagccaccatgtggttgctgggatttgaactccagaccttcggaagagcagtcgggtgctcttacccactgagccatctcaccagccccctttttttttttttttttttttttttctctctgccttttgtgaaatgtctcacagatagaatcaggctcactgaggcgtttgtgcccggtgtctagagtgagggcatgcccagttgtccgcctggccactgggcagtggaacctttcagtttctagctcttggcatgcacacttctgagcagatgcgtgaatgtgatattcccctcagagcagtgcactcctcggaccggagtgcgcttaccaggctctgccatcactgtgtttagctctacaagataaataagcaggcttcccatgcagagagatccccagagatgtgtacagatgatttgttctgtggggtaagcacatccatcatgcttctcagatagggccatgaacaaaacagaagagagaaaacattaatccttgtggctgtagaaacagctcagtggttaagagcatctggtgctttacagaggactgcagttcagttcccagcacccgtgtggggcagctcacacccacctgtcactccagttccaaggaatctgatgccctcttctggtctccaaaggcacctgcacacacacatagtacacatgtagaccacacagagagacagagagagagacagagagacagacagacacagagccacacagagagagggacagagacagaatggatgaatgtaattctgcagaggtgaagtctggcacaggacacagcaacctgatgcccaaggccaccatccatccagagaggtgagtgacttgatgcccaaggcaaggatggtaagagggaaatgactttctctaaagtctgctcactgcacaccagggctgtttcttttcccctctttggatttttggaaacagggtctcacatccttagactcagcatgtggctgaggatgcccttgaacttctgatctccctgcctgtacctcccaagtgctaaccataggcatgcgccactgtatgatacttccatctggatacctgtgctttcatgctccttgacatgtcctccctgactgttggattgtatgcgtgtgatgcgtgtatggcgtgtgtgtgtgtgtgtgtgtgtaagggggtgtgaaatggagtctctcaaattagtcagcttttggctctgtgggctttgttctttgtcggccatagcttcagggttttttccctctctgtttcatgctgccttcccttgcagcacacacacattggaccctttgatgctgtcccttggctgcaggcaggctcagctcatttccttgtcttctctgttgctgggtcaggtgctcgctgaccttttggtgttcactgagtctgctgtgttgccctgttctgctgccaagcctctccagtgagctttttattctccattctacaagttctgtttgatttccctttatcttcttctccccctgagacttttaagtttttccttctggaccaccctgctttgcttcctggagtagtttttactaatcgccattcagaaccctctgtcagctgattccagtcgtggtgccctttcaggtggcctgagcactctcactcctaaggacttgcctggttctttgtgtgctggataattttggattaaccctgggtgttccctgtgtcaatttctaagactctgagtgagtcgtgtttaagactctcagggagtgttggtatcttggcttcagcagacattaggccagcatatcacctttctcactttgaggccattattaaataaaataaaagctattgagacacaagactgggtcctggcacagtggatctgataaccaacatggctatcaagtgccgtcgaatgggtagcagagacagtatgtttatgttggatctctcaagcagatggaagagtatgtcaaacaggaattttactcctgacatttcaggttcatgttttcagactgcggttgactgagggcaacaaggacagcacagataaagggaggcctttgagctgtcctctcctctgctgtccttcagccccacagtcagggccttagcaggcttccgtgtgctttcctgtctttgcgtttacttgcttgtcccagtagacctagaggggaaacagtgggctttccacccagttagacttttctttttgtttgtttggttttttttttttttttttttttttgagacagggtttctctgtatagctctggctgtcctggacctcactctgtagatcaggctggcctcgaactcagaaatccacctgcctctacctcctgagagctgggattaaaggcatgtgccaccacgcccaggccatttagacttttctaactgaaagggggctttcctccctcagggatgagggacctggacacaggctgtctatgaggaatggcctggggactggaccactggagagaagaagatagagacaaggcggcagggacaccttggggatctggctctcggtctggaaagcaagtcaccttacttcttccccaagccaggactgggtggctagacccatctctccctcatgcttcttccaggtattgcactatatttagtccaggatgaggacagcaggggcagaaatgacagcctcctgccactctggtggtagtcacatattgatctcttctctcacctatcggccagcattagattttcagaggtaccagtctgcattctctgcggttatcagagccacatttgtggtgaggcaggtgaccaggcacttgcccagatggacagggatcctagaagccccagcctcacggcgtggagcagagaacccgggctgaataaagaaaagggatgtcattgcatgtctggccaggaaccgtgtggcttatgtggggaaagaggaacagggtagatggttggacaaagctaagtgctgtgctgctgctcaggggctctctgcagtcctctgtgagtcagctggttttgtcttcagtgagtgagcagccttctgggctaagctagtgagtgacagcaaaggagtcctaaaccccgtggcaccaatgagatacgatggcagatctcatgtgagggtccaagtcaagcacgggcacacagaaatactgtgtacagttagttacctttgggcagttcatgtaaggcacatatggaacatgtacatattccaaggcatcacatatctcaggtcagccacaggcagcctacattagacagtttcaggaggagatgtcgggaaaggcttctgagagtggaggcttgaacgcaaggtggtgggtgtttgcatccagatggtcactgtgcatgtggcctcctgtgcagaggccaatctagctctataaagaaaccagtacctcaccatcactggagaaggtgaggcaggtggtttccaggccaacgtaagctgcagagtgagatcctgtctcaacaatagcaataatgaaagttctcagtgtgcttgtacctgcctgcgctctttcatcctttgtttgttttttactttttaattttcaaaaagcaaagctaaagttgggtgtgatgattcacatttatattctctatgaggtaaaaggaaagatagttcctttgaggttggcctgagatatgtactgagtagctaggcccaccttgattacaaagtgaaatctcactttaaaacaaaaaatagtagacacccaagaaacgaccaaaaacaagggctgggcatgtagctcagtgggtagaatgcttgcccagcaggttcaaagccctggggtcagctcccagcaccacataaactgagtgtggtgggacatatctatattcccagcattccagaggtggagacagtaagttcaaaagttcaaggtcatcctgggctgcatagtgagcttaagtctagcctgagctacataaaaccctatctcaagatgggggcccgaattttattgcaataatgattctcactggattaaaaaaaaatgctctgaaggactgtgttcagtcccttacgacacctagcattaagatgctgctgagtagtagctcttggacaggccgcctccatcacccatttgatccctacggcaacctacaaaggcagccaggcttcccaggggccatagtcccctttgagccctttgagttctggtcttgttttcattgaacataacattttcctcaatgccctgctgtcagtgttgccctcagatttcagtgaagtgacagaattaatgtaagaatatttacacagcatttttattgcaccctttggttgttttcccatctttgttgcacgtttaggttattgccctaaaatagaccaagcagataggcgcgatgacatgagggggtcagaggataccagtgacctgcagaaggcccccaggtagaacactgtcagcttgagatttctgcatgtggtggagcaggcttccacatagctagggatttagccagagggagaggcaaactaggagagggagacaggcttgaaggtcagggagggagacaggcttgaagatgaggagagggagacaagcttgaagatgaggagagggagatagaattgaaggtcagggagggagacaggcttgaagatcagggagggagacaggcttgaatatcagggagggagacaggcttgaagatgaggagagggagatagacttgaaggtcagggagggagacaggcttgaagatcagggagggagacaggcttgaaggtcagggagggagacaggctcgaaggccagggtgtacagtactgaagtggtgaaggttcagagttgctcaagtacctgcctgaggttgcttctgaatcatgacagcatctctgcctttgtccctggcgagctgtgtgggcagctctgacagagatgacaggtgtcctgaggaggcggaggtggacactagtggcctttccacagaggacatggggcagtctgccagggcttcctgcctctaggacagtagcttgatctctcctcccacgggacacagatgtcctctacatgtgcgcagctttatgcttggccctcctgtgccagaagacagcactgaacctgaagagaaggaaccatctctcgctcccatcgtgccctccagtgggctttttgggaaggcatacttttatatcccatgggaggaagcatgtctccacctggtgatggcctgctcttttctccataccaaaaggcagacactgtttatatattttgccaaattaacccaaaagcaaggaaagtcaagccagtcagcctgactgcatccaactgtcctagctgttggtttgtcctgttaaaaaaccctggctggacaggcatggtgccacacacctttaatccctgcactcagaaggcagagagagacagggagatctgcgttcaaggccagcctggtctacatagcaaactccaggctacctagagatacccagcaaaagaccctgtctcaagccaacagaccttgcagaggcaggactgaccagtgactgagatcaaactgaagcatgtggttactgtggaaacactggcgtgaaggaatgatgacaatcagagaccagtggacttgcctgagataatagaaccatcacctcgtgagttttgagtgacacacagggccccggagttcagacttggaggagctattgcttgtaatcatgattcgcatcccccacttcatggccacttgggctgctagccttttagatcattctagatgttggctgtagggtggtgtttattgtagaactttccatggtagcaaaatcaaggaagaaggaggaaggagcctgtctcagtcatggcttgcccccagcctggttcatctaggtatagaccagctgctgttcatggagaatatcacctctcattttctccccctcaattagggaccaacagtcagtcctttctttcccattttcttcttcccagagatgttaaacttggcatccctttgcatgtaacatgatgagggttacaaaggagtttcacagagaaacatctcagagggaaacaacaggcacccctccctgttgaaaccttcctgttggctttcctggcaagaagacccaatgttcagggccatactgttcaatgggccttaccctgtttgaaccctacaagccatgaagagcagtccagcccctcacagatggaaggccatggtcccatctccaaatagttgttcccaaccatgaaatccacttcctctctgatgttcctgtggcagctcagcatggcgtcatttcaatgccttctgttgccagtggctctctactttattctttcatccttttttaaagtcttgcaaatgtatcaaattaagatacctttgaggcctggagagatggctcagtgattaagtgtactgacttatcttctgaaggccctgagttcaaatcccacaaccacatggtggctcacaaccatctgtaatgggatctgatgccctcttctggcacgtccgaagacagctacagtgtacttgtgtataataataaataaatctttgggccagagcaagcagggactgagtgagtggggccaactggagtgagcaggggtccttaaaaaaaaaatcaattcccaacaactacctgaaggctcacaactatctgtacagccacagtgtactcatatacataaaataaataaataaatcttttttttttaagatgcctttgaaaatccactgttctgtataagtagatggctccagggtcactctggcctcagggttgaagttaacaatgtgtgcagggccaatagccagggccatggctattcacagtgtcgctgtggaaagagctagttgctccttccagggtgttctgagcattctcagcacaagcagcattgttacctggctttccaccagaggtttgccagcgcctctcaggaccactctagcttgtgtggcggttgccccgacacatgggttgacagtagttgtgtcgtcacactgagtacctttcagcacagcatttcttcatgggaagacgcatgccttggctgttctgcccttgtaggactctctcggcagtgtggctgggattggtatgctttatttatttctactcaagaaataagcgaattcttgtcaccacactgtgacagccacttcataatgggtctgtggtgatgtaattgcacattaaataaagtaaaggatgtatctgttttagaggtcctttttatgagaatgagatatggtatcgtgactcccttgatcacagcattaaatgttagtgctgctgtcctatcatgagtttgctatgttctaagcctgacatgcgtttctgtggtaatgggccgtggtgtatgtgtagacagcacactcacaccgtcagctacctttcccagatcttgctactcctcctcctttgtactcaccgcccatccttgatgtgacttcttctgagattctatgcttctccaccccttgcctgagaggaagagatgcatcacgtgacccaccagtggtcagctctggcctcctgactagctgtggtcacagttccatgccaaccttaactggcctctgagaacagctactactgctctgcagcctagccctgcctgctcccccatctcctccatcgtgtccagctcttgtgctggtaccacaccctaggtggtcctgtacatgcttccggttcatgaccctcacccacttctagatgctccctggagttgcagccatgttccacctccagccttgtactcagggaccatggctgtgctgtggcgagtggcatgtcagtcctcagttcagatccaggaccctaaatgaagaccctgaactggctaacttcttacacggcatgttgtggttctctcacaaggctacttcttagcactcccctggtcagtctctagtttagcccaagaccatgacacggttgctcacaaggtcactccgcagtggcagcacttggtaacgctgtttcaggcccacctgtgggtagtgtcacagcctagatgttattctctctctgtcttctcttaccacaaagtgacccagcctgttgatgctattcatggagatcttgtcttgtgctcttggcctctcctcagcctcccttccccaagcccattcacagcgacagcctctttgtcttcttgcttcactatgtagatcattgcattgtccccattaccagcagtgtgcctttggaggctgggactgagggagagatgctaagagttgcttcctctatcctcctccacataggagtgtcccctacagatgtgtaaggtgctgttgatgtctggggacatggccaaatttccacttactttcacagccttgtggcagctccttccctagcaactgcaacaccgctcctgttttggctaccaccttcctgagctggcactggaaacactctgagaacgccagcatgagacatctggcacctgatgggaggctcacaaaatgccgtgcatgtcttcgcctagcggcagtctccagccaggcagattcccattccaaaggcgcgggactgggtgcctgctgctttctagactcatttaaaggcacatttttgtctctgccttgttagagattttgttattgggacagccagtgtctctgcacagggagggagggagggaggnnnnnnnnnnnnnnnnnnnnnnnnnnnnnnnnnnnnnnnnnnnnnnnnnnnnnnnnnnnnnnnnnnnnnnnnnnnnnnnnnnnnnnnnnnnnnnnnnnnnnnnnnnnnnnnnnnnnnnnnnnnnnnngagggaagcagggggctcagcaggtacttggagaaagtaactgtgggtgcctctggcaggacaagagtctcatagcacaccatgtgtcacctttggtttggccaccaagaaactcaactcatctgtcacttaagggcagtagtgggtttatgtgattctacaagtcggtaaattaccctggaaccatattaactgggtttaactctataaacagctacctgtgcaccactgcccctaaaagaacactgataatattctctatggcttgacatacttacactcatgggaagaacttctctttcctaacatagccagctaccacttgccacctcaactaggcctaggtccctgcctggttgcacagtctcttattctcagtgaggagcagattggttggtgaggatctttgggactgttgttacgtctcccaggaggaccaaggcagctgaggtgcctatttagcatggcaaagcaaatgaatgcctactgccaggttctctgagcatcatcagtccctacttgttacatggccctcctggctggcatacctgcctcctaccctaaactcctccagcccagaggctgagaagagctgcctttccccatctgctcttctctacataagccaaccatttccgttactctgctctctttaggtctcctggcagctgcacctggttcctggttccttcctctctcttcttccttcccctcccctctcctcacacggatcagggtcacatccactctggactctcccagatgtccctgcttctggctatgctctcccttttatctgcagtaaaccttctcctccaccacacctaggagcagtcatgtcctttcctttttcctttttctttctttcttttttttttttttttttaaattaaagttgaactcatcagcttggcaaagttgaaggtcttcttttggtcttaaagtaggtggcttgtttctgaacttctccagtggctgccacctggttggggtactggcctccagggctttgtcagggactgtgtcagggcaccatgtcacagccttctgaggttcttgttaggttgggacgggtgtaaggggaggctgtgggagtatatgtccagaaagcccagagggagtcacgggaagcagtgctgcagcagaccgactgggtgtgtgtatgggtgggctgaggtcttgtgagcctcgtgataatttccactttcctccactgtgcttgcactggtgtgctgctgtgcagggtatctcaactgcgttctgacgttgtgatagaatagcagacaaaagcaatgtagtgcagttacagcccatcgcagcggggaaaccgaggcaacaggaacttaaggcacctaagagacagaaatgagcgaacgctggtgctcagctcacgtcctgcttttcatttcatctgacacctcagcccagggaatggcgccgcccacctcagtgggcattctcgtgggcaactcctacatttgtatccagaccaccatagtcaattcccagccaggcaccatgcagggcaccagagcacactgagcagacaggaccactggtgtgtttgcagctgttatgagagaaacagccactacctggaggcagaagattcagttgtcttctagtgttgaaagggacagatgatgggtacaggccagaaggaacaagcagcgggagagggcaaatggccttcctgcttcccggccctctgtagtgtgtttaaggaaggcaatggaagtcttaagagtctccagagcttgagtgaccaataggaggaagcagctttaacaggccactatagaagcctgttagaccccagcccagttggaaagggatttgtgatggtccctgctggatgtggggcagtcagggcccaacttccacactgcctcaggtctcagtagccttttttctggtaccctgagggtacaagaaatacccagatatctacacctgacaggtattttatgtagtaacatttgtcttccttccttattgctaccggaacaaatgactatgtacttagtggctttaaaacagctcacatttactgctttattgctgtgaaggttagaagttctcagctggtttattgggatagtcaaggtgctggaaagagcccttctcacagggaaatgcagggaaaatgcgcttccctgagtccttctcaaggctgcagggaaaatgtgcttccctgctccccagcttccccaagtccttggctttcagtttttctttatcaccaacccagcagcccagtgtcatctccttttctgactctgaccacccttattcctaaggcccccggtgatgacatcatgctatcttcatatcccaggaccacgatgcaaccttgccagccccattctgcctccacttttggcagttttgagacaagagacaaagcaactgttgtgctgtgtgtcctgttcaggcaagggctgggccacagggaaactagagcatgcatgtacacacacatacactgcatgcacatataccttttgtgctcagagttgctttctagggaaatcccagctctcactatggtggtgttggagaaatcagagtttgaacaaggctccggggatgtggccaaatgtgatagcaggcaatcttgtcatagttcctcctaaagctgggaaggctgatgcacaggtggggctgggagggacccaaggaggaagttatcatgccctccctacccttgaaatggtgataccatggctgcctaccagggcctacctgtttggctctgccaccctggcctgcacttacctttcccccaaacttcctatggcccacccaggccttcagtagataggaaggcttctctggtctgcttttccagtgagcagctgcccagcgactacaaggacctcctaggccatggtcaccttagcacttgtgtgtggtactggcttctgggggccagatctccttaccagacctagcagagaaaatctcagtagtcttatatgtgtgtatacctgttcatgttcttgtgtgtgtgtgtgtgtgtgtgtgtgtgtgtgtgtgaagtcagaagtcaatgtcagatgtcttcctcaattgttaggtccaaaggatgctccatttcccttagacaaaagccagtgtttctcaggaactcgtaaagcctgttcctctctaccaaaaggagatattccccttatcactggtagaagggacacatggatatctgtggtgccttttaagcatagcaaaccacagctggcctccaggatctcttagtatcactaaaaagtgcctattacacatttcagatcctgcctcccctcctctcctcccttaaatgtcccagctactcattcttcttatgaccctactattttggctggacctccctctctctgacttcatcgttccctcccacccctccctcactctctctgtctctctactctgcttccctcatagccaggtccagtctgctggccctgttcaggctacagctttatctctctgttctcgactctttctctggctggcctctctgtcatatctacaataaaaaccttcctcttatctatagcatggagcagtcacatcctcagcttatacagcctgtgcctgattttttgaactagaatctctcacagagcctgggcctgcagatctgagtaggctgcctggccaggggggctgcaggatccctcctattttcccctccttagtgttgagattgcaggtgctccttggtgcacatggctgcttgtttgtgttaacacagggtcagagatccgacacagcccttgtgcttgtgtggcaagcactttactgactcttgtactttgtgagcacacagaagcagacactccagctcctgctcttggctatacctcctgctccttgtacagtggctgattcacggtgaacaatcagggagtttgtggcatgaaggaatctcagctgaatgaggaaatcacagctacttggcagcaccttgaacatgaaccatgaaagtgtggggaggcgggtagctttcctggaagcctgaggatgtctgcattgtggagcagagtcctgaaacaaaaatctggggtcttagactggctaccaccagggcctcttggagcctcttcctatagatccacagatttagggcccacaaggtgctttgaaatgaatttaaactcattgccaccattgaaaaactggaagatttcatcatgccttgaaatctctaagaactctgctattactggatctgtgctcctgaatagaagaccctggctggctcaaagcagagacagtcagttctatgtcctcaggccatccgagatcctcctctgaggttgttgtgagagctacagagaccaataccttgtctcactgggaaatgtatagctgtgtttccttcctgaggaggggactaggagctcatgcccaggtcctatggcaactgccatctcaccacagcatctcaattctgtaaggagggttggtcacctcaccagggcatcctggctctgtatgcaaggttgcccggctggcctgttcctctgagagagattaggccatgatgctgagtatcctcaggggaaaggacactaaacaagctgtgcactcaaggccaaggaccagcatctggcccctttgtccctggcctgtgtttttgtcaccatctgtggtagtttgaatgaaaatggccaccacaggctcatagggagtggtgctatttgaaaggattaggacatgtggccttgttggaagaagtatgtcattggggatggtgggctttgagatttcaaatgctcaagctaggctctcagtgtctctctgcctgtggatcaagatgtaggactctcagctcctctccagcaccgtggctccctgcatgctgccatgcttcctgtcaggctgataatgggctaaacctcaagccccaattaaatgctttcctttttaaagagttgctgtggtcattgtgcatcttcacagcaatagaaaaatgactaagacatcattctgaactcacagaggcagaggcagttctgggcttcttggaaagggtgacttattcaccttgccagccccatgagtccagggctggatcagaaagagcctcaaatcagtcttgtcttgccttctgtgatgtcaggcccatgcggctcttctcgtctcttaaactggcttcttctttgactcacaagtcactggtatgatagtgggctgagggagggacctggacttagtgccatcctgttaccagtgctgagtgtgtctccagtccactgttatatcccagagtccccagtgtcccagtagagatggtacacagtaggatattttctgtgactatcaacactgtcctcactgcctcagacactggctgctatgatgtccatgttataattattttactagctgtgtgtagaagcctgtctgtcagggtcacagtattttttttttcctgtgtgtcttagtcaggatttctattcctgcacaaacatcatgaccaagaagcaagttggggaggaaagggtttattcagcttacacttccacattgctgttcatcaccaaggaagtcaggactggaactcaagcaggtcaggaagcaggagctgatgcagaggccatggagggatgttctttactggcttgcttcccctggcttgctcagcttgctctcttatagaaccaagactaccagcccagagatggtcccacaaacaaggggcctttcccccttgatcactaattgagaaaatgccttacagttggatctcatggaggcacttccccaactgaagctcctttctctgtgataactccagcctgtgtcaagttgacacaaaaccagccagtacagtgtgtaactgaacccttttcttagaataaatttcaagcgttcaaattcttgacagacatagaatttctgaagttgcatctgccctcattgccagtgaaccggagaatgtcagtttaactagacctttggtagggtttgcactgtagtagttttttgtttgtttgtttgtttgtttggttagttggttggtttggacagggttttcctgtgtagccctggctgtcctggaactcactctgtaaaccagactgacctagaactcagagatccacctgcctctgcctcctgagtgctgggattaaaggcatgctcgattgcagtttttaaatgtaccttggtgcataaatggtctaatttgtgtgttttaattttttttttttttgagacagggtcaaatgtagtggcctcaaactcactttttatctgagcatggccttgaactctggatctttgcatctctacctggaattacaggcatgagccaccacacctggaaattttacgtgtttctttgcggtgattaatatggcttgagacttgtctgggcatttagtggctgggcttcttgtgtgttcatctgagtggtttgtgttttgtgagaatcggggtttttacttagagtggaatgaatctacaatgtggtaggattaacagtgtccctgacctagtcactgcagatggtttccttgtatggtctccatgggtagctacaagcatgtggtcatgtgtgtggctttctgttctttggagagtaataatgcagtgccacatggcccttccacattgaacccagtctcactgtctcacgcagggagaccttcccagaaagcaaggccgtacgtaggtagcagatgttactgggagagggaatcctagtgcccccctttaccctattctctctgagcgtccactcactgccttctgacctgtgggcccttgctactgtcctggcctagacaagatgtcagagccaaggttggtgagctgcttctgccccaaggaaggctttgtggactctcctgcacgtgtaccgctgcccctgtgcatgtgcgccgaggatggtggccagagccagctgttctatctttctgactcagagaatctaaaaatattttgggctgggtgtttggagggaatctatgatcaacctgtgagtgttaagctctcaggagtcagtgtgtgtgggtttggactgcacttcccccagtagaacaacagaagcggtacagatggtggtcctgcccctgcagtcgcctcctggggatcttctctgataggcccgaggaaggatgaagatgctccctctacccccctagcatggctgtcctgggtctttgccatttggctgctgctccttagtgctgataagcatggcttccagaatagcgaatacgttctgaaccggtaccagagtctgagtttggaagctgaagtctccatcacagcccgggtctgtgtgccctgcatcccatgctctctcagcagcgtgagcttgttcccactgaagtgtgctcattcacacaccagatgctcagtaagagtccgcacttgctcatacacgagtctagatgaaaggctagtgcagggtcagcagggaccataattaattttgaattgctatggagagaggcctctccagaggtggacacgtgagtgagtttggccttcagggtgaacaggattctgcagtggggatagggagggagggagggaaagggggaagaaagagaggaacaaaggaggagggagaggaggagggactgcagtgatcaaagcacaggaggtgacttgccattgatatccaggtggctgcagcacaggggaccacgcagagactgagaagcagcaagaagcttgggtaggctccaggtctggaggaagactgacaaggagctgggggttgggggagaggaggatggctcagcagggtgccacttctgcagctacataggccagcgagccagcaggagtctgtagctggtccttagctctgcttcccttggctggagcaggtagaggtgtggtgtgctgcttagcagggagggatcctgatgctggcgtccctggactccttcagttagtgtgcccgtgtcatgcttctgcatagcagcaaaggggacatggctgttggcatcccggactctgaggtacagagattatcatctgtgtaggaaaagtgtgagtcacgcttccctcaagtctatttgtgctcagtggctttcctcggggaactgtccttctcatagtgacagtgtttatgtctgtttccattgcagacgccacagggcctctgagctgcaagagacttcggccgtggtggccaggcgctccccacacattgtatacgcttgcagcttcaggaagctgctcctcaggctgtgcccatcctgtttggcagcccagctaccatggaggccccagaagtccctgtgggctccctgattgactttgagactgaaccacctacctcccctcctttggaagcagcaccgtcaacgctccaggacccagatggctccctgggtgatggtgcatctgagagtgagaccaccgagtccgcagacagtgagaacgacatgggcgagtcaccttcacacccatcctgggaccaggaccgacgctcttcctccaatgagtccttctcctccaatcagagtgctgattccgccccagatgaggagaccctggcacttcgagagtttatgcgcagctacgtagagaagatcttctctggagggtaggtcctctgtgggactctgtggggtggaggctaggccctctgtgggatgaacagactctgtgaatggaaggtagaccctttgtgagaagaagggtggaccctctttgggatgggggttaagccttctttggggtgcagagtaggccttttaaggacactagtctgctacctactatagactacagtggctcttcactgcctataaagtcacactgggaggttttaaagagttcccactcctggagagtaggggttttagttcagtggtttgtcttagttagggcttgtattgctgtgaagagacaccatgactacagcaattcttataatgaaaaacatgtaattggggctggcttgcagtttcagaggttcagtccattatcatcatggtgaaaacatggtggcacacaggcagacttggtgctgaagaagaagctaagagttctacatcttaatcttcaggtagcagaaggaagatagtgagacatactggacatagacacccccacagtcacacacttcaactccaaggccacacccacccaacaaggccacacctaccccaacaaggccacaccccttagtaattgcctctccctgtgggagtcactctagaggccatttttattcaaactactgaagtggtagagtgcttccttcacaagctcaaggccccattgtttggtccttagctctggaaaacaacaacaaaaccgatagtttccagtcctggactccaccttggaccaactaatgcccattacctggagcagcagatcatgtccctactgtccaggactgtccggaaggcagcatactgatagctcataggcgggatgccagcgccaagggtggccacagagggcacggtcctcagcctggccagacctatgctccctgcttattatccaagtcagccctggaactcagtctcagagtagccagttcacccacatcctcttagtctccttgcttgactccatttcatggcctcatggggaccaaggaaccagatgggcaactgtcctccatggtgtcttcagtaacctataaggtatggctgtacccctgttcctacttagacagaagatgctgtggagaaacaaatgatacgttctgtaaggagcttacatagtcattccagaattttctctgagcattctttttttttttttccctgagagtattgaggattgtctcatgcgggaagtgggtgcagctgcaggccctgttggtatccatgttgttcgtgtctcagcaggcagtgaggactgtggagaccagcaacagtctcagttacttttctgttgttgtgaagagacaccatagtcaaggcaacttacaaaacagaacattgacttggggcatatagtttcatgggatgaccatcatggcggggagcatggcagcgatcagtcaggcatggcactagatcactagttgagcattttcatcctggtacatataaacaaggcagagagagctacctgagaatggtgtgggcttttgaacccaaagcccaccccccagtgacataccttctctaacacacactatgcatttaaatattttagcctaagggggccataggcatccgtgctaggcaagtgccttactgctgagctacgcacagcccctctgccttcgtgtgtgtgtgtgtgtgtgtgtgcaactgtacatgcctataatggcttactgctgagctacgcacagcccctctgccttcgtgtgtgtgtgtgtgtgtgtgtgtgtgtgtgcaactgtacatgcctataatggttcacgggccagaagctaatgtcaagtatctttcctattcactctgcacctctttgagagagggtctcttctgagcctgaggaagtctagctgaccagtgagccctcaagatgctcctgtccctgtcctcagcactggagtgacaggtatatggttgcacatccagcttttatgtcggctgtcctggaactcactctgtagatcaggctggcctcgaactcagaaattcgcctgcctctgcctcctgagtgctaggtatgcggcactacacccggctgtagttcttttttaattaagagtccgtgggttggttcatttgctctgtgtatgtgtatgtgtgtgtgtgtgtgtgtgtgtgtgtgtgtgtgtgtgtgtgtgactttcaggggtcagttctcacttctgccttgttgaggcaggctctcttgttatgctgctgtgtggctcactacagactagctggcccatcacagccagcttttacatggcttccagggatcagctcaagtcatcgtgtttgcatggtagaacctttaaagtaggggcaccaacagcaaaggcccagaaagcagatgcctggggttagactacagcctgagcagagcatctctgctgtagcgctgcctgtcctcggcactgttaagtggtacctcagctgggacagggaggtaggtggcagcccagactcaaagggttccaggtctagtcactgatctgttagcagctacacagctcaccagaacttagattcattatgggccagctacatcagcatctcctgagctggtggaaatgcagagctcgaggcaccgtagctcctctgggtgtgctcctggattctatcaagcccgttcttttttttttttttttttttggtttttcaagacagggtttctctgtgtagccctcactgtcctggaactcactctgtagaccaggctggccttgaactcagaaatctgcctgcccctgcctcccgagtgctgggattaaaggcgtgtgccaccatgcctggtatcaagcccattcttatggggacagtctgcccacagctatagtcccgaggatcctggtttacagtgtgattgtccactttcattcaaacaagacaaatgttgacctgtagctgtggctgtggctcttctggcaaagttacttgccctgtgtgcatgagcccaaagtgcatttaaccctgagcagtgcagaaagcaagcttggtggcatagaattgtaaccccagcacttgggaggtggaggtaggaggttgcagagatcaaggtcaccattggccacatagcaaatttaagataaagaaatatatatgtaaatatattactattatattttatatatttatgatattttagacattatgttttatattataatacatataatatgctatatattcgtatataatgtatcaattagaatatgttaatgtttatatataatatttcatgtataattaatattattgtctagtgacaaaccaataagtacaaattatataagctcaagctctctgcctcattgtcatctgtaaatttgagggaaatgtttgcctatccacagagaagtaagggctcttagggcctgtgccctcatcagggcgcagatcacctgagcaggaggcctgctggcagagccatgggtggaattcccactgggtaggccccattcgacgctcaagccatatctggaccttgaagtcaggctcctggtttcagaaataaatgcaagacactgttccctggaaggcgctgagagttggggacacaccccactgtcctccatcccctcctagaggacctgggtccatgtttttgttctgcccttcctccagggaggacttggaccaggaagagaaagccaagtttggggagtactgcagcggagaagacgggaaaggccgggaatggttcgcacgctttgtgagcgcacaggtgaggtgggggtgggggtggtggtggtggatgggtggccaacaacctggtcagcaccactgtggtgaagagagaggagggtgcaagccagaaagaggtcaaacacagctggggaaggatataaagaccttcccctgactggaagctctcctttgaaaggagtagggactgtggcaagaccgccccacaaatttattttccaaaggcaagcatgcgggctgtgtccacgcatgtttttatgaaataacctctagcattcaatttttgcgaaagataatatagtcagaattgtgaaagccaggcaaaaccaaaagtatggagagacctggggaaagaatcacgccttgtatgccttgcatgtttctatgtaggggtgtagtcttcggagagaaattagaaaatacagggaaaagggattaacaaactcaggaatagcaatgttgtcatttggggtcctgtctctccatacttctccccgtgggggagctggatgtgaagtttctttatgaaatcctgtgaggatggcatagaggagtacctctgggctccagtgcagagggccccggagaactcctgtgccctgtccagggtgctggtcaaggggaggtggccattggggcccttccaagtgcatggagacatgcagagtgacaagtcccaccgacactgaccggcctggttctttctgcacagcgctgcaagtccaagtgtgtgtcggagccaaccttctaccgcctggtgcagtccttcgcggtagtgctgtttgagtgagtaatagcctctccacagcctcttgcagctgtcccttccacctttcccacccctggcgagccagctgtgagtaatggccacacagctgtcatccactcagggctggaatccgtgaccaccaccttccgggagcccactactcggctccctcctgcctcaatgggagatgacatcattctgtttgcccttctcattcacagtatagcatctgtaactggactagtagaacttcctttttttttggtttttcgagacagggtttctctgtgtagccctggctgtcctggaactcattctgtagaccaggctggcctcaaactcagaaatccgcctgcctctgcccctcaaatgcttggattaaagatgtgtgccaccactcctggctcaaacttcctctttttaaagcatccttctctccttgtgtttgctgagttggatggctgtgtgaatatccattactatttggctgtaatctttagtgtgttgcaggacagtaaaatggcccctttcagagtaagagtggcgctcggtatgccagtcttgcgtgcactagtttgctttgattttcaataatcgatgtgactagggaaagcagtggcctggggtcttaggagtcatacatattctttccccacacaaccagtctgagcctggggataccctgtggttcatgttcttacagccccccaggaggctccggtgagggacagcactgaacatcctgatgaaccctgagaaacaggagcaatggccaatggtccacatcagtggtgcgggaccaaggcctgagatgacttccagtcctgccccagctggggtacaatgggctgagcttcctggaccttgatttgatcttaatgtgaaagcgagcaggctgagggccacaaacatccacccacacctagaaccaggccatgcccctgcagtggctttcctgaccactgttccggtcatcgctgtgtgtggcagcatttggtactgaggcttcccaagcgtttggtcctgcttcggtaacctgcaggggtgccgggcccgtggcagcacatcagcaccacatgcctttaatcccagcacatgggaagcaggggcagtgaatctctgggagttgggcagtggggctctagccagccaatcttgttcacatcccagatgccaccagatggacgacttcgggcctgccaagaacctcatgaccatgtgcttcacttactaccatctgggtgagtacgactgaccagagcagccaccctgggaaaggagctgggagccgggaacacagcaggagggaagcttcctttattaacagcaggtgctgtgtggcttccagagagaaggagctgatattgggaggaggacagcaggcatgagactcccggtgtgggaggaaatgtgggatgcacttggggtcagggcatggctgtccacactgcaaaggaaatgacaggaggcaggaatgctacatgtggggactcagctttctgctccagcaaagcacaattcagagcaggctatcctgggaagagtccggggtagctggggataactgagcaaaggtacagagcctaggggtctcttttggctcatggtgttgaaaggaccagtgtgcaggagttatagggtgtcttgtgctgagccctgcagccagccaaaagagaccagttcaactcttcagggagggtgctggaccctccctatggaggcctgggcatgggtaatcgagtagtccctaacagcccgcttctgcacgtgctccaggtctcctgctcccagcatccccaaatggcccaattgctatagatcatggcaggctgtttgcttgactggctaccatcaaatcaaatagaaagctttatcctattcgcccagtcggagtccatcggcgtttcctttgtggtgttacttccactcactgccctaaggaaggaattctggtctctcagacctgctgtgtggctctcagtgtagatttctcttcttcccagatgccagctccttctggctacctctgccctcccacctggctcttgcccacttctctgtgtagtctgtgcttactgaacactccggagaggcccggccttcccttctgggggagcttgctaagccagctgcttctgaccacctaccctgttgaggagactgagggcagcacctcctgtcctgcagtccctgggaagcaccttcaggcgctctctctctctctctctctctctctctctctctctctctcatctgagctgcagactgcttcttactccatttctccccactttcaaggcaagccccagctgcccccgacagagcccagggagaagccagcaggcagtattgactcctacctgaagtcagccaacagctggctggcagagaagaaggacattgccgagcggctgctgaagaacacagagaacatgaaaggctttttcggggggctggagaccaagctgaaaggaccgctggtcaggaaaaatgagtgagtgtgccccagcctgagcttactatatgggaggagcgtgtggcttacctagtcctggccctgcagctgttcttgagtcacacagctgccagcccagcacgactctgcaccccagagcttccacatgctgtccactcattgacaggcggggtccaggaaccatgtttcctgggctgccaggagcctgtggctttgttgtttggcaacaggaagttgaacactctgtccctccttcctcctgccactgccgggagagttaatgtgagcaaagccaggaaagccctgggcgcaatgtctccgggagaggctgctcttgcaacagatgatggttgttgttttgtgtgagacaaggtctctatgtggctcgggctgtcctagagttttctctgtagaccagcctggccttgagcctccgagtgctgggattaaagtcatgagccactagaccgggccccagagagctcttaagatgggtgcattggtcacaggggggctgaagctgagacatcttaaggagagggcacaacagtacaaggacaaccatccagggacctgcaccgcttaaggcttggctatagccagggtatgccacctgtccctccatgtccacacagtaggcccacagaaaatggtaccaggcaatctcagcaccacaggcctcagtccccagcctgccaattgccactgtgtcactgacccccagcttctcctcagaggagttgcacagagaatggggcagcatctgcatgtgagggcctgggctccttcttactgctgtggtctctccctccagggaagatgagaacaaacctaaggacagacagacgaagactggtaagaacacagctctctgggctgcctagggggtggggcctgtagcaagggggaacctggggctgatgcctgggattaaggagtgcccaaaggaaggcagagtctacctctcgggcctcttaaccaagacgcaccatccaggcctcaaactggctcaccattagccagcaacaagagcaagcaagtagcaaaagaaagggctttgctgcctttctaagcagactaaggaaatacgaaatccctaaccgcaggggagttcaaccagagggagggtgccacttcagggttcacatagggaaaaagccctaatctaaggctgcagaaagcttcgtggagtttggacagtgtaacgtgatgactttgtggagaagcagagcgagctgagggtctgtaggatctgcccgtggggagcccagcccaggccgccctcagatctccttattcctgcagtgaccatgatcagccctgaggatgagcagaagggggagaaggtttacctgtacacgcacctgaggcagcagcccatctggtaaggcccatggacactctgcccatcccacccggcgcagcggctgcccagtccctcagctgcccgtgtctccagcaaggacggtggccgtcctcacctccagggtagccacggcaagatgatagatgccagcaagtgttcgtagggatgtgaagacatctgactctccatggggaccattgtggaaatgcctggcagctccccaggggctaaccgagtggccgtgtgagcagccgttccattgtgggtccatgcacgtagcacacggaagtcagaatggagctcgtaacacactggtcagaacaggcccaaaccgacaaggccagtgggctctagcataagcatgatgtggtctgtccatgttgtgaactgtggagcaagcctgcatacagatcactgcacagtggcaagagcaggcagccacagaggagcccgagtcatccgatcctgtttgtgctgcagctgagaagcagcagtggtgacccactggttccttatggggccgcggaactgctctgggcttgaccgtggggggagctgcacaaccgaatgcacttaagaatcactgaatcgcaatccgtggttatttcttcattcaactttctaaattattattatcagtgcattgaatgttttgcctgagcaccatatgtgggcctggtgcccttggaggccagacatgagcactggatcccctagaactggagttacgttacagatggttgtgggctgccatatggatactgggaatcaccagtcaggtcttctgaaagagtagcaagtgctcttagctactaagacgtctctctagactcctacacaccttatttaattctgttgggccagggctgtctgcagtgccatgtttatatatatagattgtgtcttaatgtttctgtgcatgtacacacacaaacacacacacacaaacacacacacacacaaatacacacacacacacacacacacacacacacacacacacacacacagtaagaaccagctctctggtatggtgaatttaagatgcagggagctgcaggagtgaggtctactgcaagggtctgccaggtaccatcaggaaagaattcaagttgttactacactttcgagtcagttcttcagaatgggttgtgaagcagggctgccctgtgcacctggcttttcctttgccatcttgaggtgcagccagggagcttttccagaacaagtacgagtctgtttagaccctctcgacataaatcttttttttttttttttttaaagatttatttattattatatgtaagtacactgtaactgtcctcagacacaccagaagagggagtcagatctcgttacggatggttgtgagccaccatgtggttgctgggatttgaactctggaccttcggaagagcagtcgggtgctcttacccactgagccatctcaccagcccctcgacgtaaatcttaagtcaaataaatatctttataaattattgtgctaacatcagcaggtagtagcacaaaacagaccaagacagcagcagttaggagccctggctgcctcccatgtcacattcactcaccagtgaggagcaactctagcttggaacagaacaccccctacctcaacatcatcacagcccctccttcaaaggtcacggtccagtagggatgtgtggctgagaaatgtcatgggcaccctcagggcagagggctaggtggaggctggcagaggtcagcacagggaggctggccctgagtcaactggagaagctgtgcagcagagaagggaggggctcacggggtctgtgtcacctcagttggtgtaataaagggccagataccacgcttgtggccactgttctcccacatgctatgcagtggaatcaaaactgccatgtggaaccttcacggtcagatgtaggaggtcataggagacccctgatcttctgcagggagacctgttactgactccatgttcctgtggctgtgttcctatgacggccatggtgtgtggctgctggcttcctatgttgctgagcagatcctgcaggagtctagtcgtccactattctcagaacccacactggcttccactctgcccctcagtccacctgcctgagcaactgagccgggtggtctattcagtctccccacgggccttttcaactcttccatcccctgccaggtccccagggcaacactttattcatgtctcaggcttcccagactctcatgagaagccgttgcttttggtgtggaggggagagagggcctgggtagatctttaccgtgtctcaccctgcaggcacacgctgaggttctggaatgctgccttttttgatgctgtccattgtgagaggcggaagcgatcccccaccaccaggtaggagccaagagtgtcccctccaactttgggggagaggaccaagtcttggctcagtctcccaagtagtccttgggagccagcaaaatggctgctgttgatggtttcttccacccatgtgtcccagagccctgcaagctgcctgagggctcagcgctcacagctttgggggaggggtgctcagcttgcatggtgcttcctgttctggggctctggcatgatgtggcctgattctccttaacatgctacctctgcccaagggagaccgctggcctccaccccacccctctgtgtactgttagaagcaggcctggctgtgcagctgccctctgggcccattgctgaacctaagcagaccttcctagctgtgcccaggctagaccttcctagctgtgcccaggctagtcctgcacctcacaccctgtgggaccctgttcagaaagcatgggaagcaggaagggcgcatccccgggaacacagaggccctttttgtgtggaccgggcacaggttgccacccactccgtcagccacaagggagcagtccctgtggaagccaggctggccctgccggaccaccaagtgtgggactttgtagccaggatttcagagcttcggttgactgtcactagggaggccctgggccttttgctgtgtttgggagggagcagatgagcacagcaacatctggccaaggctcctctgctggcaagccattatttgaggtagaacccttcatcagaggggcagctgaggccagtgggagtgagttggcttgcctcaagtcccgtggttgtctggtgggaccatttcctggggaagcagagggggcatggggtgggcaaggccctagacttccagaagaccctggggagaattctactctgtctggaggctgggcggcctccaggcacgccattggcttcttgctgacctcgtccagctcctagggatccatctgttctgggttccctgtctctctctgtcctctctgctccctcctagaataaagctctctgcttgttctctcccatccacatatcttgcatgactttgacatgtgcctttgtttacctgtttctgctgccgctccagaggggatgctggagagcaggaggagaagaggtgtgtgtccacgtgactttgctccatttacagctctgggtttcttccaaggcctctgtcaggaggggagggtacctctggggaggcatggcctgtgctaggtaggctggtgacagggcatggcccaagacagagcttgccaggaccaaagcaccctgagatgggaaacaggacactgtgagctgttccaagaggcagcgtggcactgtccgtgggtccttctccacctgggtcggtcacagggattccactcgtgtggaagtggagggttggagtggagaaggttcttgtttgcagtttctcccactctcactggaagggagtgtcacctgatctagggtcacatggaaggacagctaccccctctttttcagccactgggtgaccagaagagctgggtggtgggtcctctgagcctacatgaggtctgattcatgtttcccagaagcccctgtgacacatatttagagtaaaagccacacccacacattaagagttgtgaacccaggtagctttccttggagcctgggtgtgtgtcgtgtttcatggttcacagctgtgctactctgatgacccttgctgctatggctttatagtagccatgaggagcattcaggcctggcatctcctcacagtagcaggcccccaccatctctcagagaatgctaagacaaaccatcttcctaggaacagctcaggcccatcatagcctccccagacaactgagcaagctcatgatactggtccagttacctattctgaatccagtcgaaaacactaccagctgcctgggcctcacagcctcctcactggagctcaagtggctaactggtcaggacagtcctactggagagtagctcgggccccccaggctccagcagccatctttttcaatgacttctaactgcagattcctttccatcacccagtcccaaaggtttccatcacgtggtgaacatacacacacacacacacacacacacacacacacacacacacacgcttagattggtggtctatgttccatatataggacattcattgacagggccttaactcagctctcagcgagcaactagatagcaggtaccagccaggccaagttctcatgaccttccaccctttcatcagaagtcaggtgacaccttagttttagtcctttccacagcaaggagagtcacctcctcatggggtcaggcatgcaggatcggggccggtatgccacactctgagagtattgtgcacatgtgtgcatggctggttgctgggtggtacacagttgtttgtacttaaacagcctcacagcaagtgatggaaggctgcactgtccctccagtgcattctgggatcttcttagaggtgctgcctgagcttgtagagcccgcaggtgagctccatcctggtgaactgcggcagtcagtggcctgggccagggagagcctggcctgggcttttgtccctttgctttgttctttctctcccttccttctgcttctccatgactgacagctcctccctccatgctccgtcttctctccctgtgctctgatcttctctcagccttacgttagttagggtcatccacgctgaggcttttctttggaggcagtgggccacagtgagcttcccctcctctcagaagctgtgtatctgtctctgagtaccagggtctgacttcacgtgggcagcgaacacagacacaggggggcttctaggccctctgaggaggtggccgctccaggagcctcactgggaaggggaaaagccagggtgatgtgtgacatgatggtctttctgaggtagcggcagaggtgttagcatagacaccttcctgtcctgggccttccctctacacagggtgggtgggtgctcaaaagaacaccccaacattacccgagtccccatcccatgctaaagagttcttagagactgtccaccactccactgcccgactgggctctagagtttgggccggcttcatcatgcccacgtggtcacaggccagtgccaggaggcctataggaaaaatgtggagtgtttcctcagtggtgtgtgggtcagggaacagtgtctgtgtggaagggacactgtggctgtcagtctcaggctccccattcttatgtctcctatagatgttgccttgtgcatctggtcccaggacaccagtcctagcccaagtttcctgggccattggatagaccgagtccttgggaaggctgtgggtggccaaggctctcccaggtctccagatcaataggatgttgttagctttgtttcgggcagggaataaacacctaaaggtgtgtggggctcccccagcaaatagcaggctctggtggaaatgacctgccaaggcagatccctatgcatccaagggcagtgcagactaccagctccgcagagcagggagggagggtcccaggctattctgaaacccatcccgtctctcctgtgcccacagggagaaatggtgccacatgacccaggaagaacgggatgacagcctgcgcttcaacgagaacatcaccttcgggcagctggggtgagagctatgaagccagcctgggctgcctggggcagtgtagtgggtctaagttctgaggagcacagggctgggtgctcggtcctcctcttgatcctgggggtggaggtgggagggtaggggtgtgcaaagtccagttaagaagtatgggtgacattttcacctgatactgctccaggtctcagccatccccatcctcccctgagttagagcccagtatcttggctccctcttctgggctgtcgggagggtaatggccatgggtgtttttcctccagcacgttcacccacaacatgctggcctttggcttgaacaagaagctatgcagcgacttcctgaagaagcaggctgtgattggcaatctagatgaaggtaagctggcctggagatactgggggtggggagccagagcaagccctctatagtggggcttcccaccctgtcagaaggagggcatctgtcacagaaacctgtctccttggcttgccttctttcccgaatccatggaacatattctctggctgtacaactggaagtcgtttctgctgagggatggcaggtggcgtgtaacgcagccaggtcagagatgggtctggcagtctgtgttacttgtgcagagcaaaaccctggtcacagttggtgccttctagagcgccacttgttttgccccacactgtcagggcagcatggcggacagtgggggattctgagctttcccggagtccttctctgtctcacccgagagtctctgacctcagtgcagtccggcactgcagccaggtttgccgctgctgcttcccctgggccgaggcctgacacacctatgctctgatgagccagtaactcgctcctgccctcatccccagccaggcagagaggctgtgtgagcacagggacaggatttgcagccatcgagcagcctcagtgtctcatccctctccagatggccgtcagagctcagcgtgccttctgtcggctgctcggggccacactccacacatgacaccattcctgtaacacccatgttcctgagaatgaatgcctacttccacctgtgtgtaactggagacacgcagtgcactggtgacacggccagcagcctcatccctgacagactgagccatgccattcctgaatgccatctcctctggaataatcctgttctcttttccagagcaatacaagctgctaagtgaccacatcgagcaaatggccacagagtaggagatcagcacgtgctcgtctcctaggatctgtcaccccagtgatgaccctgcatgacaccagcagcacccagagccgctccttgctgccctagaactagcagttaaaagactccagaagcctgtctcccctgcctgtgtctgctctccctctatgtctatggtgtcccctgggttacacagctaaacgtgagggaccatctaccccccacctatcctcgagcaccaggcttgtgagatgagacagagggtggaggaagccatgagggatggtccccacggatcctgccgagagccacggacatgtggttacagaggcgcaggaggggatccacacagctgcaacgtgaggacagaatcagtgctgtgaatgacagcctgccactccctgccacaggactccctgtgagctgtacagaggaccatggagccttcctgaaaggtctcggccatctgttcttctccacctcctcatgggataggaactgaaagagaactcaagggttgtcactttcctagagggtgtgagcgttctgccagccacaaccatgtctcagactcaagagctccgtcaacagagcctcggaactggccactcaatacagtctctccctcaatagcacagaaggtccttgagctcccaggccgcagcaacacatgcagtgggacgcaggaagcgtgggcgagcattctcctcggcagctctgggggggacagagctaagagcacacagaatggatctgactgagggaggagaccacgggaaagcaaggttgcctggtagctccagcccacagtcctccccttctgaaagacccacagcgatctgcctcctcagcatccagcgtgctggctccagagctgctgttcccatccacgccagtggcctcggtcccttctgtgccaggcattctggtcactgaccttgaactaggcctgcaggctctcctgtcaccccgcatcacctcacccttctctgtccctcagccttcagtcacatttagtcatggtctgcctgtgagcgcagtgagttctctcctgacagctgtgagctcagctggtgtgggtgagcctttcctgcaggaagagcctcccaagggatggccaaagaagagcaggataggcaaagctgtggaatgtacatttcctggatgtcaggggtgaccaaaacagtacatcagttcctgagatattcaagcaaatgcccccgatagcatagtgtgtgccaaccggtacacctgactcagcattaggatcctataaccatgcctgtccctgctctgtgttttagggaagtgacataaagtgaggtcgcccttgctaagtcctgctgtcctctctagagccttcctcagagctgtgcaagcatgggagcctctccttgctcctcccagtcctgcactggcatgagttcgggtgtaggaggacatgactccaaggtgctgggagatgcaccagtcttgcgcagcagcacctgtggtctggcctctgccttgccctcatgcagccatgagctgccttaaggggaagagtgccaatggtcttcgtggacttcagaagtgactttgagactgttcctgctgaccttttgagatagtcacttaaggaaggatggctctctctcatctgtctcttgttccttattgttgcagagctagctccacagagtcagaaagttctgacccacattagacccgtgtgcgctgctaaggccatggtaaccctctggggacaggcagccattgatgggagcaaagcttgcaggtgcctggaggtggtcccaccattgcctgcagatgtccttcctctgttcacagttaggtttagtgagcatttcatgtcagggagcctctggccagtgtctctgggaggtcactaatctacccctgaggtacccactctttctgtcgtagctttcttctagggccccaacaagcaagcataaaccaggcttgctggccagcactccttggctcccctgccgaaccacagacagacagttcagattaccaggataatcccaagcagtatctccagtctcggctggtagtggcccagatctatgcaggcccattagcacacattcaaaccttccggggctgtgaccttcaaagctgtgtaaatcagtgtcaagcacattatagtgtttgccctcacaggaaaaaaaaaaaagtcccctgttctgaaaacaggccagtggtgggccgccactctgctgctatcagctctgttaggttattgtgggtgttagaggccgagcacagcgacctccagggcacctctgcggagtgactagccacaggcagagctgcattgtggtatatatactgagagatctgcattgttcacctgccagactgggattttcctctcatctaagacacaaagcgcctaaggtgctcagcgtctcaagaggactggggtcgaggctaatctccaagctccatctgcaaaggaaggaggtcttcctagctgagccgactgtacatctgcagtccctcactcaggagatgggagcaggaggatcaggagttcaaggtcatccttggctacatagggggttcaaagccagcctgggcccaatgaaacctggtctcaagagaacaaaaccaaaccaatcaaatatggtcctaagaatgcagggtgggattagagccagtgtctctgcttgagatggaatggtgttcccagcctgccttgtcactcctcacctgagaggaagcagtgggtggtctgactctgcagcccagagacacaggaggcttcagggacagtgccctactctagaaacacctgccactctagatagttagtgtgagggatccaggcttgtgtgaggggaataatgtggaaagctgaggtctaattgtggtgacgttagctgtcccaggccacaagccatacccaaccttgaccttcctgggtcacaatgatcagttggtttttccattagggagggaaggtctgggcctgcttagcaagaaccgctttattccggttcccataccacattcagccggccaggagacgagcactagaggaaagcagtaggaagggactctaggaggtggcactggccccacagcctctgggaagtgacagagatgcctcagctctaggctcctgcccttgctgctcccaccttccaagccagttgcagagcccctgctaaggaccgagcctgctcactcatctcagctccagccgcacagccacagcctcaggtctgtttagcttgggaagccaaaagtggatgcctgtgttcatgggcctcccctgggagttagtgatttgggggaccagcctcactgcagactccaggctctgacaggtagtggcctgggcccagctgcaagccatgctcccctgagctataaccccagaaactctgcactttatcaagaaaggaccccctccttatggattgccttggctttgaccctgagctaaggctggccctattccatccttcttcctagatgatgggtgtgttaatgggaggaaggaaagagaccctgcctagggaaggttggcttacagccacccttgcaagaagtgctggtatagggtcagctggggagaagagccctggtcagtggccttggattgtcacttctttcaggataaagatcccttgggggggggggagttggatgtttgactactaggagatactagaggctcagacagcaggcatgtatccccatggggaatatgtgaggacctggaccgctggctgcctcagctgtacctggttttaaatgcagctttctgtagagattctacctgcagtctgttctctcttggggttccacacccatttcttgccagcagctcccagtgatgctgtgttttgtatgttagttacacaactttgtgtcctgccaggtcatgttctaaaattaaggctgagaaaggtgtgaggtcgaagatctcaggcagcgctgtttcctgtgaagaaaaaaaaagtgtatatatccatagatatagtactttgtcttgtcaggaggtggaaaccgaaataaattatcttttaaaaagaagtcagattaacttcttttcatgtatccgtgaggacttcacgggatacatagtcacgtcattggccttacagaaatagatacccccacccaactctgacttgcctgactggacagactggaggctaggttagggtttgcctggggcagaatgtggcctgctacttggacatatgagcctccctggacctgatcaccgcctgtcctgtggggccagaatgggtgtctgatacctgtcacttcccagataggagaggggagtgttctggctcagagaggaggcagggtcaggaggagccttgattcctaggtgttgaccaagactgatcgctcacacaagctgtctgtggaacaaagttgcaaaggacagaggcatctcttcaaagttctaggaccctgccatgctcacgaagccctcatacttcctagggagtagaccccccagataccctgaaaattgagccaagggctcattccacatatgctcccaatggcccccatctatcctttgtttatccccacgttggatctctgtgtgtccatggctccatagccaatgtatatatacatcatgacatgtctgtgtcatggctgagttcagtacacgtctgccaacttcatgaaccaaagggttaagctctgggggtgaaaagcctgcagacgatctttgtggagggcttgggaggcagccaccgtaaggaccctgatcttccagagggggcatttgggcacagacctttgtgcacagggagagaacatcatatagaaccaaaagcagacaccaggcatcatggccaccggaacagtagctgatcgtgactgcacctagccagaggctgggcaaggtctgcatggcccttccttcccagccttaggacctccgacacctgacacagttgtgccttgccctctcccacctgatgtggcttatgacttccgggctggcaggtctaggcttctgcagccttagcttcccagttggcagtacttgaccgggaagacctcagaaactcatccaccatgcttttagcattcacacaagtgcatccactcctggccgccagatgaaatcagaaaacagacaaagcatggatgcagttgagattcacgtatcttttactgacacagggagtataggccggtagagcggcctactgtgccaataaagaaagcgagaccccagggaatccctgaccctgagaacacaagcagaatgcaccaaggtccaggccagcctatgccttcctcctgccactgaaatcctcttcctagtctcggggtccttgctgttgtcccttgaggtcctccagggggatctcctccacggaatcagtctcactgtcctcttcacctccagcctccttcccctggcgtgccatggtactctgagcactctagatggcagaaagaaaagtcacaaccgcaacatccaaaccaggagtgaccgcgagttggagaggtggctctcctataccactataaagagtgacttcagtcatgagccaccaggtaggtgaggccaagagagagtggtgctaccaagcagggaaatggcgtttgcagagagagtccaaatccttcactgggcttaggaccttcatgaaactcagtgacagacccttgcactggtcacctcccctcacaagggcaacctctcttcacagtcattacttcccctccctgtgactctgaggccatgtctgccctggtcacgtcttacttacaggcaccaccattttccctgacattgttagcctagagctgatgagagcaagcctctcccaagccaacaggtgacatttggtgtgtgtgattcattcctaacatctgagaagatctgaatctgcctgtggccctggtgaaataaagtctgacctgccatggtgccagagctctccatcctgtctccacgtcccactcctgtgtactcccctcacttccacttccctggcttcttccctttgttcccggattaactccagtgatatgtccatgctcacctggctggccagaggccaggggacagatggagcggggttggtgtctgtgagcggccgagcttcaccatgcccgtaaattccacgcgtcttggctctgaagtcctgccaaggaaagatcagggtggctggatccagcttcaaagcccaggaatatgggctttgaatggggtaggaagcaaaggtgagaggggctatgcatcatctctgggcacttcctgtttgctgtctcatggaccccacagcggccccctgaggggatgttctagttctaaccccttcaaagagttgggaaaactgaggcccaaagacctagctaacagtcacccaggacaatggctggctcaaaaccactctcaacccctgaaagagtattgtagagctgagacttgggccacatgcctgtaaccctggcactgaggagtctaaggcagggggatcatgattaaggctatcatggaccctagagatgaatgaaccttgggagactatgaggtttgtctatagccttctgtgtggttttatagcttatgtaaaaagcctttgatggatctttcatctccctgtctgtttccaagtgccagacttagtgggtgacctgtagcatcctggcagaagcatacagagtaacttcctcgcgctcccctcccccaaggctttaatactccccccaggctgctggctgatgtgaacaatgcaccacagggaatctggggcagtgccaggctgtgggctgtgtaggctccaatcaccaggctcgacacccataaaaccccacactgcttcccagggctcctttccccttgcgcagagctactgccgccatccccctagcccctgccctccaccatttgtaaaatagcccagctccagactgtgacatgaagccacaagacaaagccacaggtgactggctcacagcagcaggtttggggccctgagctctgtaaatgaagcttgctgtgaatctaatccgtgcgcgtgtgcggctggggacagttagtgctttgcactgaaagctgagtgccagccatggtggcttttatccccgctgttcctcttcagttctaagtagtcctgtggtgctgagcagatgacatcccaggtcgccagagaaagattccccagcaggggtggcacccgaaccaggtgtttgaaacagctcagcagcagagcaagccagatagaaacccaccgaggtgagacccacctgcaggtctctctccaggtcatagttctccaaggtctggaaagcgctggaatacacctccaccgcctttgcgtggaaaaccatctcgatggtcacaaagtcagagaagattctctgcgggagagaagcccatgtcagcatatcagtgtagcagcaccatacaaggtcacaccatgccccctcccccagccttttaaagttttggggcatagccctgtacctagaggcaagaagaccccaaaggtgccaaaaccctttcacactgcaaaacagtggctgtttaaaatacctctcgtctaagcctgcaccagttcctagcttcattcatttatatactcattcattcattcattcattcattccaccaataattccccaatacccaccacatatcccaagccctggatctagaggccaagtggcctggggtcttgctgatcttctgaaccgcagagatgagagggataaacccaatataggggggcctgatccagggcaaagcctaagtctctgagtctgtcaggagcttgggtctccagcctgctgggctggggatcgctgcacaggagacagaaaggcaattcccttgggaggaattgttctttgttcgtaggacaaggtaagccaccaaggggtgtggatcacaagagtgactgacccatctgaggtcgaacagtggacaagagtgaactggagaatgaggtaggcaaggatattcatggtcagtcggccctgcaagagcaaattccttgagacctcttacaagacctggggcttgacctagtcttccgtggcgttgggggaggggcggtctggtggagataaaggggactctgttggcctcacagcttgtcagcatggctgctttctaaagagtgtttagagtctgagggggcagcgaggtcctcttatggacacaggtgagaaagaagagcaggcacaggagaggatgatgggatagctctacctcaggctctcctggttgggggccgtgtccagagctgggtgaggaaggatggcctgccctgagtggacagcctctcagctgcgcctgaatcagctctccccacagccctggccacagaaggccatgcggtcacaacgctgcacacgcacatactatcaaacacaggcatgcgcatgcgcacgcacccacacaggtgaacacagtcgcccaaagctgccactgcctacccggaggtccttcagtttctgttcctggaaggcatccacggtctccactaggtggagggtagaacggttggtgtccactgaggccctctgtgcactggtctccgcctggcctcagggtcacaataggtacaaagtgttaacagggtggtcccggcctctcgatactctctattctgggttgttctctgtcttttctttggggaattttctcctgcctcgtggggtctctgaatttggtcactgaagaaatggtcaaactgaagaaatggtcaggcgggaccatggtaaaaggttggtcacgagttggacagacctgcttcatagctatgtgacctcagacgtcacttaacttctctgaacgtcagtttccttgcctaaaactgggtgttggtaaggagacctgggagaatcagatgtaagaggtgcagagccacttcacagtgtagcccgcactttgcttgtgagaaaccttgagggccccatacccatccccaacgccgctaacaattatcattccgaggtgggcacttctgggtctgggctttattccatggggtcttcatattcttggtaactgattctacccatagccagttgtgcgtgaatggcttgctccctccttgtagagtaaagctgcctctaggctaagcctgagcgcgttcactggaactgagtttggcatttaaggccacgtgtgacactgaggaagccacctcgatggccctcactttcctcttctttagaatatggccctaacactaactaaatgcttgtgaaatggtgggacaaggagcaaggggctagcattcaaaaggttcccaataggggaggagacccggactctaaacagatgggtgaccaggagggagggctctggcagagcctaggataaaatttggaggtgctcactccaggctgaaagccatgcctgacccccttgcttccgatgtgatgttcttcatgttacagaacggacaccaggatggtgggtccaaagatgcctgcctcctaagccctgtgccagtccacaggtcaccagacatagtaaggcatactgcaggctccatcatcccgtgcactgctgacctgacctgagcctttgtgatcctgaattctctgataaaccaacaggagtgagctggaggagaactggaaaaaggctgacagcagaggaaaggtggcaggtggggacaaggactgaggagcccagagggggtgtggcctagatgctaggaggggtggagccaatcccctagattcccagaggagtagcctgcctacgcttgaagagaccagagggccccacagtggattctgaccctaatctgtgagaagtgtgtgtgtgtgtgtgtgtgtgtgtgtggtgtgcgtttgtggtgtgtgtggtgtgtctctgtgtgtgtgtctctgtggtgtttgtgtttgtgtgtgtgtgatgtgtctgtgatgtgatgtgtgggtgggtggtgtggtgtgtgtgtgtgtgtgtgtgtgtgtgtgtgtgtgtgtgtgtgtaagccagctagactgtgactatcacggcgacaccctcatgacaatccaaaatatccccagggatcaaagcaaaactatgacttgggtccatgaagggccactctgaatgaagcctattctagtggcaagcagggcagaggtgacaagccctcacaatcttgcacccagctcttagacagatggagctatgcagagatggtagtgaccaccttcttactgggactggcactcataccctagcctctctgagcttgcttgaccaacaggctggggatggcagtagctaccctgtcatcaggatgcagatgaccccacaactgggaggcttgctggacagagcccaaatcccctggcctcagcacccaccctccctttgcctcactcaccctgctgtgctgttcccatgtgtcggctggcctcacctggtaactctggcttgatcttccatgaggttatttttgcctgtctaaaccgcccaaaggctgcctgcctgaggtgaagtgcgacacctgacactcacctgggactgaggaagactgttaaggattcaggtgaagccaggtggcctgcaggtgggaccccttagcagccccagccccatgggtctggatccccaaacccttcagtgcaaggcgtggaacggccaccctgcccagcaggaaggatacgatcatttgtcgatctgagggtgacttctgcctcagtttctccagcttttccagttgtttaatctcgttattttggacacgtttacatttcttgatatctgcctacacagaaaaaagagagacatttcctggggatgccaagggggtcaggccccacccctgcacaccttgaggtgcacccagctcacccgggtctgctttatttgggcaccgtagagcttcagggggctgatgaccttggcctccagcctctcaaccttcagggcacaggtggcagcatgagagaagcagagaaggcatgagcagcgcccgcactctgggggacacacagggccctgggacacccagcatcaggcctggctctgcccgctcaagggctctggccatgtgcgtaggctctctcagttggagttcccatctgtgagctgggacagtgaccgtgccccagggtgtcccagcaggtcagtgggacatgtgcagaaactaggacaacaccaggcacagaacttcggggagtgtggcatgttctgggaactgtttggatggagcatcccagaacggcagaacgatgacttcagacccttctctttgcagctctgggtcccaggctgccccaaggtgcacgcatgcttgcaaacatggttggagattgcagaaagtaaagactggagtagaactcggagctggtcactcttcctgacctctagtggtggggccagggggtgcaagaggaaatgcaagaccctcagacctcctgcacaccaaactacccccaccccaccccaccccacccccaggcttcagattccaggtccccttagcagctgacagctcaggaaggagagagaaaggacaaggtccccttctagcccacagtggtttatgtcgattatcaacttgacacgattacctagaattacctagaagacaaactctggccacatctgtgggggcagttgctagattggattatattgagatgggaagacccaccctaacggtaggtgcctccatttcactggctggagagtggaactgaagaaagaggagaaactgagatgagcaacagcccctgccactctgcttccaaactgcagagactatgtgaccagctatgtcacattagccactatgacttgactttcctaccacgtgagcctgataaaccctccttccttagatgtgaggtgtctgacctcagcagccacaagctagcatacccccaggaccttgtagaatcataaggcgatgttctgggtcttggggttgcaccagcagcaaaggagttctgggttggatggagaaggcctgggtgccagtgtctaggcatggcagcaagagagatctgtctgcctgtcatggctcctggcatcttgggggttgggcttgccaaagaagcaggagtgacaggaccacaaggccactggtttccagctccctgacccttgaaagggatgatgtcatgctaaaggatcatgggaggggcatccccaccctttccttgagttcagaaaactcagtagcaattccttctgttgt

SEQ ID NO: 2181 - DNA, 1867 bp, Mus musculus
ccggcacggctggtcgcgcggtgcatccgcggcagctgcagacccgacggcgtcctgcccgcccccctgcccggtcccgcgggccgccgcggcgagagggcctcgggctgcggtgctgcgctcgcgaggggctgtgcggcgtggctgcgccgggaccgacgccacagggcctctgagctgcaagagacttcggccgtggtggccaggcgctccccacacattgtatacgcttgcagcttcaggaagctgctcctcaggctgtgcccatcctgtttggcagcccagctaccatggaggccccagaagtccctgtgggctccctgattgactttgagactgaaccacctacctcccctcctttggaagcagcaccgtcaacgctccaggacccagatggctccctgggtgatggtgcatctgagagtgagaccaccgagtccgcagacagtgagaacgacatgggcgagtcaccttcacacccatcctgggaccaggaccgacgctcttcctccaatgagtccttctcctccaatcagagtgctgattccgccccagatgaggagaccctggcacttcgagagtttatgcgcagctacgtagagaagatcttctctggaggggaggacttggaccaggaagagaaagccaagtttggggagtactgcagcggagaagacgggaaaggccgggaatggttcgcacgctttgtgagcgcacagcgctgcaagtccaagtgtgtgtcggagccaaccttctaccgcctggtgcagtccttcgcggtagtgctgtttgaatgccaccagatggacgacttcgggcctgccaagaacctcatgaccatgtgcttcacttactaccatctgggcaagccccagctgcccccgacagagcccagggagaagccagcaggcagtattgactcctacctgaagtcagccaacagctggctggcagagaagaaggacattgccgagcggctgctgaagaacacagagaacatgaaaggctttttcggggggctggagaccaagctgaaaggaccgctggtcaggaaaaatgaggaagatgagaacaaacctaaggacagacagacgaagactgtgaccatgatcagccctgaggatgagcagaagggggagaaggtttacctgtacacgcacctgaggcagcagcccatctgggagaaatggtgccacatgacccaggaagaacgggatgacagcctgcgcttcaacgagaacatcaccttcgggcagctgggcacgttcacccacaacatgctggcctttggcttgaacaagaagctatgcagcgacttcctgaagaagcaggctgtgattggcaatctagatgaagagctagctccacagagtcagaaagttctgacccacattagacccgtgtgcgctgctaaggccatggtaaccctctggggacaggcagccattgatgggagcaaagcttgcaggtgcctggaggtggtcccaccattgcctgcagatgtccttcctctgttcacagttaggtttagtgagcatttcatgtcagggagcctctggccagtgtctctgggaggtcactaatctacccctgaggtacccactctttctgtcgtagctttcttctagggccccaacaagcaagcataaaccaggcttgctggccagcactccttggctcccctgccgaaccacagacagacagttcagattaccaggataatcccaagcagtatctccagtctcggctggtagtggcccagatctatgcaggcccattagcacacattcaaaccttccggggctgtgaccttcaaagctgtgtaaatcagtgtcaagcacattatagtgtttgccctcacaggaaa

SEQ ID NO: 2182 - protein, 466 aa, Mus musculus
AARDFGRGGQALPTHCIRLQLQEAAPQAVPILFGSPATMEAPEVPVGSLIDFETEPPTSPPLEAAPSTLQDPDGSLGDGASESETTESADSENDMGESPSHPSWDQDRRSSSNESFSSNQSADSAPDEETLALREFMRSYVEKIFSGGEDLDQEEKAKFGEYCSGEDGKGREWFARFVSAQRCKSKCVSEPTFYRLVQSFAVVLFECHQMDDFGPAKNLMTMCFTYYHLGKPQLPPTEPREKPAGSIDSYLKSANSWLAEKKDIAERLLKNTENMKGFFGGLETKLKGPLVRKNEEDENKPKDRQTKTVTMISPEDEQKGEKVYLYTHLRQQPIWEKWCHMTQEERDDSLRFNENITFGQLGTFTHNMLAFQKKLCSDFLKKQAVIGNLDEELAPQSQKVLTHIRPVCAAKAMVTLWGQAAIDGSKACRCLEVVPPLPADVLPLFTVRFSEHFMSGSLWPVSLGGH

SEQ ID NO: 2183 - DNA, 86474 bp, Homo sapiens
gacactgtcgtgagaaggaatttaaggataagtcagaaaatagtgaaagcacagtgatttattgcaaagggaaaagtacacactcaagggaatgcgggcggactcaaaagtcacgtgtaagggggtttgaggttgctacctctataggtttctttaaccaaggactgggatattcatgaacattcctgggaaaaggtggagatttcttggaactgtggtgccacccatttttacatcaaacctgggtgttcttggaactgtcgagacacgggtgggtgtgtgtttaggatattaatgagtgtatattgaggtcctaggagaaacctggtcacatccagtgccatgttgggtccagttggtctcagccagtttgacccacatcctgggtttcagggtcttataagtccatagcctctagtcatgtgaaactactgcccagaatttaattctcctgtggccaccctggattattcttgtctcataatgttgagtaaaagcaggaagacacaaaagagtacatgcaatataataaaaagaggcaaaactgatcttcggtgtaggaagacagggcaaggcagtgattctcactgaagggaagggagcgtggggggcagggtgctagtaatattcaatctcttggtctggctgctggttatacggatgttcattaggtaaaaattcattcagttatgtacacttatttgtattctttttttttttttaagacagagttttactcttgttgcccaggctagagtgcaatggcacgatctcagctcaccgcaacctccatctcccaggtttaagcaattctcctgcctcagcctccctggtagctgggattacaggcaagtgccaccacgcccggctcattttgtatttttagtagagacggggtatctccatgttggtcaggctggtctcaaactcccaaccctgtcaggtgatccgcccaccttggcctcccaaagtgctgagattacaggcatgagccactgcgcccagctggtgtcttctctatttcaagtagatgctggcagggagagagagaaactcgcaaaggttatgcagtggaaaatcagagacttgttccggacgggtgtttgggttcttatttttcccaccgagtttgtggtgttgagttcaacagccatgctaggaaagccagaagactgaaattccacaacctgtggtagatgtttaaacccgaagagggtgacgtgtccctgaattccttttctgcaggccacctcacctccgctgtaggtggagcaggtctggaattggaggtagggtgcttggcaaagccttgtgtgggccactcactgagtgccaagcgtgaccaaggtcgtccatgctcattctctcgtggctgttaggacttgactcagaaagtgttttcctccccggtcccccatgtaaaatttctccctccctcgcattcctgcaacgtatttcgtttcccttccctggtttactccttgccacatctcacgtctcacctgtatccttcacttaccccgttgactattcctcatcggaatgcaagcctcacaaaaggcagggggttttgttggtgttgttcactgtgtccccactgcctgtccaaaagtaggcactcatgtgaatagccactgcatgccagcctgggcaacagagtgagaccctgcctctaaaaagaagtagtcatctggccaggtacggtggctcaggtctgtaatcccagcacttttaagaggctgaggcgggcagatcacctgaggtcaggagttcgagaccagcctggccaatatggtgaaaccccgtctctactaaaaatgcaaaaatagccgggcgtggtggcaggcacctgtaatcccagctacccaggaggctgaggcagaagaatggctctgtgcccaggaggcagaggttacagtgagccgagattgtgcctctacacaccagcctgggtgacagagcaagactctgtctccaataaataaataataaaaacttttgaaaaagtagtcattcaatagatctgcactgaatgaatgagtgaactcactatgattggtcccttttctagacaaacaggaccagagaggttgagcagtgtgctcccggtcacacagtgaagaggtggagagccaggatgccgccccaaatgtgccttgaacttcttagctgctgttataccccctcgtagactcacttcatcctcaccaccctgtgaaatctctttgtacagctgcagaaactgagagtcagatgtaagccattgaccaaatgaagtacaggagcagagccagctggcaggtgagcaacactaggctatgaaagctctgccgtttcggctgcgccacacccctctggaaagagcccacaatcctagctctgtgccaagccagcctcctcgagggcttgccttaggcacgggtctcctacagtgggtaccatgaccacatccactgagtccttcagaagcaagcccctgcccatttgtcctcaggctacaataacccagtcctcatcttgtctaccttctccctgcgatcctggttttaaactcatatttattcattcaacaagtgtacctggtaccatgctaagtgctgcagacacatgagtgagcaaagctaggcaaagctcctgcctgttatggagcttagagtccattttcacaaatgcataattgcaaacgtgtttctgtggaggaagatgatattatttgctgagatgatacacccaggactctgacttggtctggaggtcacatgcagggattcctttaggatgtgacatgtgaaagacatggatatttgttgagcaaaggagcttgaggtcaaaggaagtgggttctgggcaaagggacacgcaggcaggtcctacagtagaaaggagcatggattctttaaggccctgcgagggtcagtgtgtggagggcaaggggaagcggttcgagaccacacagaaagcttggaagggccaggtcatgctgggccctagcaacaggtgaaggacgctggcatatgtgaggggcagaggaaagccactgaaggactggagcacatttgtggtttttaaaggtcactccaggccaggcacagaagctcacatctgtaatcccagcattttgggaggctgagcggggaggattacctgagcccagaagtttgagaccagtctgggcaacatagtgagtccccatctcaacaaaaaatacaaaaattagccagttaaggtggcacacacctgtagtgccagctactcaggaggctgaggtgggaggatcgcttgagcccaggaggtcaaggctgcagtaagccgtgatcacaccactgcactccagcctaagtgacagagcaagaccctctcttaaaaaaaaattaaaaattaaaaaaggggggggtgcacagtggctcacacctgtaatcccagcactttgggaggccgaggtgggcggatcacaaggtcaagagatggagaccatcctggccaacatggtaaaaccttgtctgtactaaaaatacaaaaattagttgggtgtggtggcgcacacctttagtcccagctattcaggaggctgaggcagaagaatcgtttgaacccaggaggcggagattgcagtgagccaagattatgccactgcactccagcctggtgacagagcgagactccatccaaaaaaaaaaaaaaaaaagccaggcgtggtggctcacacctataatcccagagctttgggaggctgaggcaggtggatcaactgcggccaggagtttgagaccagcctggccaacacagtgaaaccttgtctctactaaagaaaaacaaatacaaaaaaatagctgggcatggtggcatgcacctataatcccagctactcagaagactgaggcacgagaatcacttgaacccaagagacggaggttgcagtgagcagagattgtgccactgcactccagcctgggcaacagagcaagactgtgaaagaaagaaagaaagaaaaagagagaaagagaacaagagagagagaaagaggaggagataaggagaggagagagagaagaggggaggggaggaggaggagaggagaaaagagagccctccagctgctttgtggaggacagattagaaaagggcaaagacaggccgggcgcagtggctcacgcctgtaatcgcagcactttgggaggccgaggcggttggatcacgaggtcaggagatcgggaccatcctggccaacacggtgaaaccctgtctgtactaaaaatacaaaaaaaaaattagccaggcgtggtggcgggcgcctgtagtcccagctactcaggaggctgaggcaggagaatggcgtgaacccgggaggcggagcttgcagtgagccgagatcgcgccactgcactctagcctgggcgacagagcgaaactctgtctcaaaaaaaaaaaagggcaaagacagatacagggaaatgtcaactaataaatgtaggtggagcaatagaattagaaaactcagccaggcacagtggctcacacctgtaatcccagcactttaggaggccgaggcggttggatcacttggggtcaggagttcgagaccagcctggccaacatggtgaaaccctaactctactaaaaatacaaaaaaaattagccaggcatgatgcacatgcgtgtaatcccagctacttgggagactgaggcaggagaatcacttgaacgtgggaggcggaggttgcagtgagctgagattgcgccactggactccagcctgggcaaaagagtaagactctgtcttaataataagaagaaggagaagaagacaactcaacatttggggaccactatagacttatcattaatggatgctaaaccactagctgaaagttcattgagtttgttgaaagatagggtatctaaatagtctcaaagtatcttccccacaaatttctgattacttacaaaggaaaaaaggtacctttacaatggagaaatatatcaccattggtcaagcatagtatcaccaataatgagacaaatagacagtatgtgcctcctgatatgaagcactaagaagatcacaacttcactatgaattgctgttgctaaactgtgttacctgcctctaataataagggaacaatcaggaaaatctaaatggagggacatcctatggaacaactggcctgcactcttagtcaatatcagtgtcttaaaggacaaagaaaagctgaggaactgttccagagtaaaggagactgactaggcagacagaggaaggggccacaagccatgcaatgcaggtggcctctagaagccagagaagacaaacaattctcccctagagcctctgaaaggaacacagccctgctgacacctcaattttaggacttgacctccagaactgtaagataatatattatggttttcttttctttcttttcttttttttttttttttgagacgaagtatcgctctgtcgcccaggctggagtgcagtggcgcaatttcagcttactgcaacctctgcctcccaggttcaagcaattctcctgcctccacctccggagtagctggaattacaggtgtaccaccatgcctggctaattttcgtatttttagtagagacagggtttcaccgtgttggccaggctggtcttgaactcctgacctcaggtgatccacccgcctcggcctcccaaagtgctgggattacaggcatgagccaccacacctggccaattgtgttgtttttaagccagtaagtttgtggtgatttgttacaaacaaaggaaaaataggcatggtagtcaaacacacacagaactggtgctaatgcatatcacctgctattttgtatagttgtattttggactcatcctctattcaaagtatttctttgtttgttttttgagacagggtctccctctgtcacccaggctggagtgcagcggcacaatcttggctcactgcaaccttgacctcccaggctcaagcaaccctctaacctcaggcttccaagtagccaggactacaggcatgcgccaccatgcccagctaattttttgtatttttggtagagacggggtttcaccatgttgcccatgctggtctcaaactcctgagctcaggtgatctgcctcggcctcccaaagtgctgggattataggcatgagccatcacacccaacctattcaaagtatttttttttgagacagagtctcgctctgtcgcccaggttggaatgcaatggtaggatctcagctcactgcaacctccacctcccgggttcaagcaattctccagcctcagattcccaagtagctgagatttcaggcatgtgccaccacgcttgactaatttttgtatttttagtagagatgaggtttcaccatgatggccaggctggtctcaaactcctgacctcagatgatccacccgccttggcttcccaaagtgctgagattacaggcatgaggccccacacttggtctcagagttttttgtttttttttttttttttttgagacagagtcttgctctgttgcctaggctagagtgcaatggcacgatctcggctcactgcaacctccgcctcccaggttcaagtgattctcctgcctcagcctacccagtaggcaggattataggcacgcgccaccatgcccagctaatgttttgtatctttagtagagatggggtttcaccatgttggccaggctggtcttgaactcctgaccttgtgatccgcccaccttgccctcccaaagtgctgggattaaaggcgtgagccacggtgcccggacagaatatttttaaatattgatttagccatccaataactttactgcttctcctacctccttcccgtgtcctttgtacaatgtcatgagatatgtcggcagaggctccatcctggatatctgtagcttttccctgcctatccagaaacgaccctccttgttctggccagaccacctcagtttcctcagaagagcctctgttcccttgctctccactcaagtagtatgagtggggctgacccctactcctgtgcagatctgatcaatccagttattccaacaatctggcctcagagattggttccaggggatgaacacacaggtgcatcagtccattcagaacaaatcctggggcttttgctgaaagtattgaaagagaagatccttttttccatgggggctgctaagctgagacaatataagcctagagctcttggaggacactctgtaaaaagaacctaatctgaggccaggcgtggtggctcacgcctgtaatcccagcactttgggaggccgaggtaggtggatcacttgaggccagcagttcgagaccagcctggccaacatggtgaaacccccatctctactaaaaatacaaaaattagacaggcatggcggtgcgcacctgcattcccagctacttgggaggctaaggcaagagaatcgcttgaattcaggaggtggaggttgctgagattgcgtcactgcactccggcctgggtgacagagtgagatgatttaaaaaaaaaaaaagagcctaatctgagactgaagccaactcaaaggagcagtgaagagtgggagagaccaagttctgatgacatcacttgtgcccctggatcctgctgagccaaccccagagccttttatgtctgccaacatattccttttttggggggggggactaagtctcactccgtcgacaggctggagtgcagtggcgcgatctcagctcactgcaacctctgcctcccaggttcaagcgattctcctgtctcaagcctcccgagtagctgggactacaggcacctgccaccatgcccagctaatctttgtatttttagtagagaccaggtttcaccatgttggccaggatggtctcaatctcttgacctcatgatccgcccgcctcgacctcccaaagtgctgggattacaggcgtcagccaccgcgcccggccccctctcttttaaaaaccagtttgaattgagtttccatcactataactgaaagaatactgggaaatataccttccaggcccagatatatatttccaccatatttccttgatttacacatttatacatttcacatcaagaaataaggttaacctagtgtgacttggtctttgtcactgttgtttcatctttggagaggtcacaaatatttttttgttaagtcatctgccctgaagattttccaggcccaatgtcaggttcactgatctgtggtttgcagaactcactttcttcctcttttaaaaaatggtcatgtaatctgcctctctctaaccttttgacaaggtcagaaaaccttctacgaagtcaggagagggtctgcatgatattcccctaaaacagaatctgactctaaatgagtcacctttttacaattctcccaaacagctggtaatgcaagggcaggtcaggatggcacaagtcggtgccttgtgctaggttcacttgctgacccagggaaggagtttattcagccacagcatccatcctcctccattcccatgaattctacaagatggcacttgcatcctgctggactcacggcagaacctgcagagaccaaaagcgtacccactcgcctgtagcaaccacgtaaaggaatgaggggtattggacacaaactgaattcacaccaagctggagacaccctgagttccagcttcacatgcatggtggccacacccagttggtcaaacaaatctggagtgtactagaaggagctatggtgctgaaggctccataaccctcacggcactgcagctcccagcttttttcttcatgtgttcccttaaactttcccaaggagtctacagttcaagtctacatctttccaaggactgccacttctgcttggggtgtgggacaggtacttgatcatcgatccatatgtcatcttttctcttaagtgatagaacttgtttctcctgcataactcccgtaatttcagaaaacccaccgttttctaaaattgacattcagccctatttcagatatcactgcatttctttagagacagagcttgatcatttaaggagctaccagaaggagcattatagcactggaatgtagttgtacaaatatcttcagaaaatttgaggtgtcagtcaatactccagaaccagattctccactttgctaggtgctggagtcgagtttgacataacccccacattactagggaggggctgtcagtttatgtttctatacttcctctacaactaaaaaggcgtccaaaggcagcacttctattttaaaaactttttttcttttaattgaggagacacagaagaaactgaatggcctgaacgttgtgtttactgtatttgctgaaaagatgccgactggcctagaatttatggagcagctgagatggaatctaccagtctcaaagatgccccgttttaaaaagtaaattggcctctgattgctcttccataccaagtatccaagccggacatttttcttttttaaatctcttttgaaaaatttttataccatttatttattattattttttttagctcctgctcaaagcctcgctggactaattttaatggtatgttggttaataacatgccttcgccgtaactaggggatagggagggtaactgacacggctgttttaaaggtagggaaaccgagggccaggaaacaactagaatccgacggtatttcctagctccctgatggcgcttcccatgcccccaactaaatcatgaaataacccactcacctgtttgcaccgggcctgccccacccactcctcccagagtccgagaacacccagcctctaagcagagccagcaagggggcgccgggcgtacccgagagcgctcccaccgagcgtgggcaggcctcgggcccctcaggctccgccctgtcacgtgacaccaagcgctggccgcctcccgccccccgcgaggggagggccgtctcgcgcctgcgcagaaggggctggaggcgggcgcgtccggttgactgacagctcgcgccgcggcgccgggaaaggacccggctgctcgcgggcggcgcagtcgccgcagcagccgagtctgacggcgccggttcgctgcccggtccgcccgcggtgagaggtgcggtggggtggcctcaggccggcctgacaggctcatgaggggaaggatgacccgggagggacggcggggacccgggatgggggtctgcgaggggtgacagctgggagcgccgtggggcgaggggcgcggggagggaggaggggtccgcggggcgagcgggggcggggcctcgcgggccgagggctcaggccggggttctccgcgggctcctcgcctgctgggaggcaaagggaataggggaaggtcgccgggagcccacgggcggaggggcagtgcggacgcccgtgaatgagtgcaacccgggccgctgcctggaggaggcgcccccaaccccggggcagatggtggcagcaggtggctttgggatggagctggtgtcccagtcttgggggaagaagaaaccccggactcctgcaagggcattctggggagagggtgcaaggaccccgggggaaagacattggcgagtcatgcgtgtgtgcggggtgtgaagttgctgcctcaccgctcccggggcttagcagggtgggggtgagagaaaggggcttcctggcctgggtggccacccctgtccattctgcgtcttccctctgctcttgatgggccagtgagcaaaggggaggattgcagggaggatagcaatggaaatgcggttttagcagctcagtttaggaccgctggatcagatagaattgaacccgtttagaggatcttgcaaaggacagaattgagtgttctggagctgggtgcgtgccccccacccccgcccttgtcctgggtttgtgctttcctgggttgcaggttgattagacttgggaagatgaaaaggggaagaggaaaaaaagactttacaggggcactagccaggtcctattcctctctaggtaggggccaggcatgagtcccagcctccagattgagcaggaacagcctctgagctggcacaggtgaggcgcccctgacgtggaagtagtggctgtggtgagtcagtgttagaggcaggctgacagctgtcaggaccgaggctgctttagccagcctgcgactcgatgttgatgtttcggattcatttccttagaggcatcctcctccctcagcctaaaagcagggcagagagatgcttaacaccgaatcgttcaaaggaaaaaggtttgggtaatattgcatgtgagcgttccttcctgtcttccccccatttctcctgggaagcgtatgttctccattgttcagtgtctctctttggctgtcacttgtttttatttccactttgttcagaaataggactgcttacgcctttgaaacacaggacgaaaggctattgaaattggctcgcaatgaaaaagttgactcatgagattttttttccattaaagagatgaagatggcgtgggactcacatgtaggcagcgtttgcgatcagatcatcactaacctctctgtgttacattctgacgtttctggccctgtttgccttttgtatgggatgtgtcagttagtgtgaaggttggtttgcattatttgagatgtaacagccaaaggcaatgagaagccactaggtgactgagtaaatcacaagccttaaataatctgctgccaaatcccagaaagtggtcgatttccatagatattgaatgtggctctcttttcacgacaataactgcttcttcaaaggtgaattgctttatagtagccccagcggctctgaggagcatcttttaggacagtccccaggaaggggtgggatgagtcatgctgtctgcttctctctcctcccacctcctccctcctttctctcataaagcaaaagtaatcaggttaaaagaaacacgaacagcagcctggggcagttttttaaaaaaagtcctgagaagtcaaccagcagcaggaaagacatgcaaaggcaggagtaaaaaccctattgcccgtaataaccctcactttaatacttcccaagggttttcccatgcagactcttggctgatcttcattataagcttggcagtcatgatgggtttgttatcgttcccatgtcatagatgaggaaactgaggctgagtgacttgcccagggtctctttgctactgggggcacagtgaagtgtttaacccaaccgtctgacgctggatatagcagcccttaccgctctgtggaatgggaagtggggcggatccgggtggtttgtgcctcacacgaggggtccccagaggcttgcaaaacatccttctcttccaccacctccccggcttaccgagtctgccgcagcacccctgcgcccgccccaagcttgaggtagtctgcatggactcagatttatttagacgtccttgagaaatccagtaggaagtatgattgcaaagagcgtcttttgcttaagtctctgtgtttccaaatagcccaggtgtcttcagctgtgtgaggcaagagagcacgcagttctccggcagcctgctagaatcgttttccttgtcccccacccaaaagagaaatgcggtggttgtgaaaccaagggagctgacccagtaactttgtttattcgaaaccgttttttatatgtggcattgtatgcattatggtgacacttaagaaaaataagccatagggctgggcgcggtggctgttgttttcctgtaatcccagcactttgggaggccgaggcaggtggatcacctgaggtcaggagttcgagaccagcttgggcaacgtggtgaaaccccgtctctactaaaaatacaaaaattagctgggcatggtggcgggtacctgtaatcccagctactcaggaggctgaggcagaatcactggaacccaggaggcggaggttgcagtgagcctagatcgcgccactgcactccagcctgggtgacagagaaagactccatctaaaaaaaaaaaaaaaagacaaaaataaaggcatggtgttctcatgagggaaggacaagttttaatcccactttctaaatctgggcatcatggggaggagtcctaaaaaggaattcacggggaggttggccagtaaatgtttcggcaagtcagtggtataaaacaatggaaagccaaggcaatccccagcacacgaacagaagtgtaggtctggaatgaaacaggtgatagttccaatctactccatgcttagaacattgtgttcttttctggacatcacatgtaatgaaggatgcagaaaaaaataagcatattaattggaaaccgctacagtggtgaatgaattagatgtaagcctggagaagcttgggaactgtgatttattaagctcattctgtagaggcccaaggttccaagaactgaaggacaaaagtaatcgttagaaagacttggccttggctgggtgtggtggctacgcttggaataccagcactttgtaggggccagggtgggcggatcacttgagcccaggagttcaagatcagcctgggcaacatggcaaaaccccgtctttaccaaaaaataaacaaaaattagccaggtgtggtggtgcaaacctgtaatcccagctactagggaggctggggtgggaggatcagttgagccccagaggtggaggttgccatgagctaagaatgtaccactgcaccccagacttcagttttaagaccgtgattatgcgagagtggtcgtttaaaaactcttgagttaaatcttgtctgtccccagcagcttcccaggaccttggtcaactagggcaactgcacaggtgctgactgaccctgcctgtttctccagcttcattgactgctgctgtcattcaccacggtcctgccttcttcctgtgccttccgtgtgccaagatgactctgcctcaggacctttgcctgggctgttcctcccctttccatggccagcttcctgtcattcaggtcactgctgcaatatcacatccttagtgagaccttccctaatagtcaaaataatgttcctttttcctctgatccctgcccactcactctatcatattacagtgttttattttcttcataacaatatcagaaatgaccttgtttaatggagaatgcttttactagagacggtgaaacctagcctggctagcggaccactgggcaagagaattcaggcactagacagacagtaatgccaggtcacctttatttctctcgggagtgctctcacaaagaaccacgcactggggcttaaagcaaccgaaatttattctcacagttctggagaacagaagtccaaaattaaggtgtcgacagggctggttccttcttggggactcagagggagactctgtgcctcactcccagcttctactggtggccggtgatccgtgttgtcccctcactggcagctgcatcaccccagggtctgcccctgtggccacatggcctacttgtccctgcatgtttgtctccacttcatgtctcctcctgtgggtctgcctctcttctcctcttaaaagggcaccagtcggattggacctggggtccacactactccattgtgaccttctgttttcttgagacagagtctctgttgcccaggccgtagtgcagggcatgatctcagctcactgcaaccactgcctcccaagttaaagccattcttctgcctcagcctcccatgtagctgggattacaggtgtgtgccaccacgcctggctaatttttgtatttttggtagacatggggtttcgccatgttggccaggctggtctcaagttcctgacctcaagtgatcctcctgccttggcctctcaagtggtgggatgacctcctcttaactaattacatccacaaagaccctttttttttgagacagagtttcagtctgtcgtccaggctggagtgcggtggcacaatcttggcttactacaagatccgcctcccgggttcacaccatcctcctgcctcagcctcccgagtagctgggactacaagtgcctgccaccactcccggctaattttttgtatttttagtagaggcagggtttcaccgtgttagccaggatggtcttaatctcctgacctcatgatccgcctacctgggcctcccaaagtgctgggattacaggcatagagaccgcgcccggccccacagagaccctattttcaattaagttcacagattccctgggttaggacctcagcatatcttttgggtccaggggttgcggcgggtgtgcctgaattcaatccataatgccttccagcatcaagatgcagtgatgttttaaagggattggcaggaggtgctcagttatttttagggataatgacagggatgtggacgtttttacgagaagcattcatgatccttatgatttgcgagacaagtactgaccgttgtgcttcaccgtgaagaggtcgagcaatccagcgacctgcccgaggccatgcggctcctgacagtgaatctcctcacttctgattgcagagcccacaacatctttacccctcccagcagggacgccacagcagcagggatgccacagctgcttcaggtcaggatgcagggtttctctgatgcactctgcaggggcccagagagatgattcccttcttttgcgttttgctgcactggtccttgtagtggaggaacagctcatcggcgtccagcagtgaaataaatggcgcgggtgaatacgatgccctgccacttaggcaatgctgcccagaggcggtggcgtatgtagaagcctcctcccgtgtgtaattcggaagggctgttcacgaaggcctccagagctctgcacttctgcatctcatatctgaccaagggtgagccctcagggagttcatagagcaacttttctccctttgggctgggggtgggggcagggatgggggagggtagagcaggaccgtcgccagctgacttatctggtgactggcactggcacctggagatgcctcaattcctcattctgtcacccagatactcaatatgcccgtctttatttatttttgactaagtaatatgtgcagatggtaccaaattcaaatgatacagaaagatgtcgtagtttgtctctccctgccccaccccccacttcccagttaccctccccagtggcattactgcccatttcttgtgtctccttccagagatccagtgtccttttaatgtccccaattaccatcatccccctcaccccgtgggccatgctcgccatccctcccctcaatccttccttcctccaacctcgccacagcacatctgttgggacagatgacttgtttcccatgttaagagctgatgaggccaggcatggtggctgatgcctgtaatcccagcactttgggaggcggaggcaggtggatcactggaggtcaggagttcgagaccagcctggccaacatggtgaaaacctctctcttactaaaaatacaaaaattagccaggcatggttgtgggtgcctctaagcccaactactaaggaggctgaggcaggagaattgcttgaacctggggggtggaggctgcaatgagctgagatcacaccattgaactccagtctgggcgacaagagggaagctccatctcaataaacaacgacaacaacaaaaaagctgatgactgtactcctgccaaggagtttatctggggaaggaaggtgcttagcagaaatgagtctgtagaggtaaatgtggggcaagagtgtggggaaagggcttttatttatggggtggttttcgtagtcttgtgccttagacttcactcggtagggtttgccctgtccagggcaagtacagaggactcaccggaaggaaggcgatgggggcagtttatcttatgtggctgaggtataaaaatagtgtggttgttattatggctcatatttatagggtttcctctgtccacgcccagctgtgtgcccagtgccttatggggctgtcactttagccctcaccaaaacagtataacgtagccaaggttaccgtccccatttcacagatgagaaaactgaggcatagagaggcagagtaacatggctccatcacacagtgtgtaggggcagcgccagcacatgggtcagggcagcccatctctggacctgggttctttgcctctcccctgtgctgcctctcctgagaaagtgcaggtcacctttgagaccccctgtcaccggagacaagtgctctgcagggcgctgggcccctaagccccaccccacacctgtgcacctacctctgccccccttccccaggccgagccgtcaggtaccctgcttcctctcagccctctgatttccacctggctgtcaaaatcccaggccccaggacatcttcccggagcccccagttctccgagcatggccatggtggtgctgggtctgtcccccattccgtggcaggcacttgtctcttgcccccttcgctgcctgttcctctctgagcaggtcagaagtggctctgcaagttctgtgttgtcctgctcgttcttcggttccccaggcctagcccagtgctcagcatggagcaggtgacgaagaaacgctggtagcacaggcagctggtggtttaggaagccctggtctccacctggctctgtggggaccctcctctcccaggctgtaaaaggaaggctttaacctcaagtcttttagcgtcagaatctctctcactttgcttacgctgtttgttttgttttttgtttgtttgtttgtttttagagatgagatcttgctcagtcgtccaggctggagtgcagtggtgcaatcaccgctcactgcagccttgatctcccgggctccagtgatcctcccacctcagcctgccaagtagctgggactacaggcatgtgccaccatgccccactaatttatttttattttttatttctagtagaaatgggatcttggctgggcgcggtggctcacgcctgtaatgccagcactttgggaggctgaggcgggcggatcatgaggtcaggagatcgagaccatcctggctaacacagtgaaaccccgtctctactaaaagaatacaaaaaaattagccaggcttggtggcgggtgctcgtagtccagctacttgggaggctaggcaggagaatggcatgaacctgggaggcagagcttgcagtgagccgagatcgtgccactgcactccagcctgggcaacagagcgagactccgtcccaaaaaaaaaaaaaaaaaaaaggaatgggttcttactatgttgcctgagctggtcttgcacttctgggctcaagcaatcctaccgccttggcctcccaaaatgctgggattacaggcatgaaccaccacacctggcctgcttagagtgtttaaacagccttctttcctccttctttgtttgtttctttaacagcttattgagtatgttttagatatcataacatttttccatttcaattgtacaattcagtgattcttagtaactttactgagtgatgcaacccttatcataatctaatttcagaatgtttccatcactccatcaacgaaacccctttcccatttgcagtctctgcccctgcctcccaaactggcctctgacaaccactaatccagtttctgactctgtggattcgcctgctctggacatttcgtaaacctggaattgtccagtatgtggccttgtaactagattcatttttagttcattgctattgtagcacgtgtccatcctttgttcctttttagtgtggatgtttttagtgattgtctagtactgggaaagagtgccggtgccttctggccctctgcactcgtctccatctgccctcttgcagatggagcctttgattgtggggtggacgagcaggcagtagccctactgggtgtgcttatgtgttacgccacagaccttacttgactgtcacagtgttcccgtactttcctttctgttccaggatccagtccaggggaccacattgcatgtggtcacaccagcccagcaccccctgcccggggacagctcccgcctttccttatttcacacacagtttggtggtctccatgtaacacgggatcttcatagctcccagaaggaaagccatgcagcggcagcgtgtgtctgaggcccgccttgctcaatagaggaagaacctgacttgagaaaatcctgctttcattcttgcagggtttctggccttattccagaaactttctcctgcctctaaatatcagaaatgcatggccaggacccatagcactgtaggaataatttctagccaaggctgatggggatggtaaattagaagaaggaaaggagagagaaggggattatttttttctcttcatgactaagtccatgtaggaaagcatgcgcctggcagaccatcttcttcagtgacatccttttctctgccaggtgtgtttggagacattttcctggcctttacatcacagccaggcgtgactcacaagcagatgactcagtggcaaaagtgaccaatgagctaggggaaaatgagaatctgggaacagtggaacaaatggaaaatgccagagtcagtgcgtgtggacggctgctgtgacgctgacttccttgagtcaggggatatcgggtgaacctaggacgctaggatacaaaatgggaccctgaaaggaggggtggaagcctcatgagggaagagaaccacattctgagtgaatagtaagtatcgagaatgcaataaaagaatgagatgagacgaacacagtgtccatatgtcaatgtcaaacctaagactgcctcccgtaattttttaaaaacttaatttgcagtggttagaaggaaatagaaaacccgttaaccaagtaaaactagtctaatccgcactctattcagtgagaggcagattatgttgaacttcattatgcagaacaacatcactcctagaatcccaaggcccaatttggataataaaaaacactttatgagtctgctcttgtggaagcaagcggtattctacataatcagaaatttaatggaagtagaattaacaaagtcatctatgctgtgggaaagaagtagcatctctcacgtcctctctccctcctccagggaaccctcccaagtgagctggagtggccaagagcagaggggccccgtgaggctgcacgtcctacctgtggtcctgcatctgttcttgctagcatgccagtccactctccacacagtggccagagtgcagcatctttccaaaatcgaattcaggtcatggcattccccaggtgtaaaccctctagttgctcctgggatgtattcccaagtctgtaacttggcctgcaagtccctgcttccatgggctggtccctgtagccctcccaccctcagctccttccacgccacctctgtgcaccccactgggccacactatgtcgccgtagatagaatggcccaggtccatgcccttgaagagcattgactttgcctcttccctgggctgggccccacggcctctggatcatagtgacctccccgctttctccggctgaaggtgctccttgctgccagccgccttccctaacccagcacaatccagcagaaatgcaagacgcaccacgtgtatgattttaaatctagcagccacattaaacaagtaagggtatctagcagtataatttattttttaattggccgggtgcagtggctcatgcctgtaatcccagaagtttgggaggctgaggtgggtggatcacttgaggtcaggagttccagaccggtctgaccaacacagtgaaactccatgtctactaaaaagacaaaaagatagctgggcgtggtggtgggcacctgtaatcccagctacacgggaggctgaggcaggagaatcacttgaacctaggaggcggaggttgcagtgagccaagattgtgccactgcactccagcctgggcgacagagccagactcagcctcaaaaaaaaaaaaaaaataataataataatatctttgttgatagattctatttaacccaatgtatccaaaatattattatttctacatgtaatctatataaaaatcactaatgaggtagttacattctcttttctgtccaaagtctgaagtctgatgtggtcagcaggtcacagcttgaacgagccacattcatgggctcaagggccgcatgtggccagcggctaccacagtgggtagcacagctctgacctgttagtgacgtattttattcatagcacagatgatggctatagtatttttgtttgctttttttgctctctgactaggacataagctccctgagggccaggcttttgtctctttcacccggagcaatgcctggtgcactgtagatgctcaataatacttgttgagtgattgaatggacggaggccaaacacaaaccctcaattctcctgctgctatagaggtcacggaatagtcagtgccattggaagcctattttaaccaggcccatttaatgtcgcaaggttccttgtaacccaaaacactgttttatgtagggacttatgtatcatcaaaggtctgtatgattactctttttaatttttttgagatagggtctcactctgttgcccaggctggagtgcagttgcacgatcagggctccctgcagcctcaacctcctgggatgaagtgatcctcctgcatcaacctcctgagtaactgggaccataggcatgtgccaccacgcccagctacttttatttattttttgtagagatggggttttgctgtgttgcccatgctggtcttgaattcctgggttcaagcgatactcccacctcagcctcctgagtaactgggactacagacttgggaatactcctgagtaactgggactacagacatacgtcaccatgcctggctaatttttatattttttgtagcaatggggtttcgccatgttggccaggctggtcttgaactcctgacctcaagtgatccccctgcctcagcctgccaaagtattgggattacaggtgtgagccaccactgctggcatgattactctttattgggtttggtttttccggatgatgctgataccaaagaaagaaaggttttcttttcttttttttttttgaggtggctctcactctgtcacccaggctggagtgcagtggcaccatcttggctccctacaccctccgcctcccaggttcaagcaattctcctgcctcggcctcctgagtagctgggattacaggcatgtgccaccgcgcctggctaattttgtatttgtagtagagacagggtttcaccatgttggccaggctagtctcgaactcctgacctcaggtgatccgcccgcctcagcctcccaaagtgctgggattacaggcatgagccaccgtgcccggccagagaagggttttcaacaggaagcaagtgcagagattgagattctttgaagctattgcttggagttaatatagatcaggaattttcaactggagacattttcagttgtgacaactcgggggtgcttctggcatctagcgagtggaggccaggagtgccccaagcatcctatagtgcaaggacagcccccaccacaaggagtgacccagcccaaatattaacagtgtcattgtcaagaaaccccactgttggctgggcgtggtggctcacgcctgtaatcccaactactcgggaggctgaggtaggaggatcgcttgaacctgggaggtggaggttgcggtgagctgagatcgcaccacagcactccagcctgggtgacaggatgagaatctgcctcaaaaaaaagaaactccaatgtccatcatcgcaggtacacgtttgttgctgtctcggaattacctctggtaacgttgggaaagtttttagtttcaggaaacttgagaggttccacgcaggccccatcttttcattcccttctctctgttcaggttaaaccctccccaagctatcattgcttttcctaaaagcacagactaaatgggagccgcctgcagccaaagcgttttgagatgaaagaaaattggctccacttgtaaactacagatgagaattttgtagagaagccatctagagaagcgtgtgccttgagaactgtggatcaatacacttaaagcagtccttggaacctatttagatacgcttgaagcaaaacagccgcagaaacctctttcttttcgctcacatgcaagtaaacatctgccaactccaccatttccaggctcctcaaaaatgcatttgcatattgcaaagcaggactagagtgcagaatgagatgtattttaattcttgttatatattaaggtcccctaaataagaattcagctcctgttttattatgggtagaaaagtggttgattatatatgtttcagttttagggttttggggaatacttccaaatagaaactgaagttgtgctagactaggcagtatttttttaatccttcccaactctccaactaggtcggaatcagtctgaattagccatgtgggggatagcaaaccacctcacgcctgtcacttcgcgccaactgtttcctctgtccggaatatcttccgttgtatgactgacaggctcaggcttctaccagatttcacccaaagaacgcagcccttgaaaaccgccccaggcagagtggagttctgctcctgggctcctactggcatctgcctcctggagtcagagcgtatggcacgtggctgtcatcttctctgtatgcgtctctctggattgtgcttgggaaaggaagggtcatgtcctattcatctttgtttcgtaggatttatcacagttccagtgcttgataggggcttcaagatggttgccaagtgaatggcttgaactggacaaagtaacaccttttgtctcgctactcgggcgctgcctccatccgtaaggaaaggagaagtggcagagacagcagctgtcctcttcagcctccggtgatgaaattcccggacttggcactgagcagagaggtgacaagccacccggggaaggagggaccctgggttcccctgtttctctgtgttacccagctggtgacacggtgggtggaaaatgggggttctggacccatctgaggaaaccaccgcctgactttggggatacagcttcaccttgtcacttcactctctgggcttcagtgtcccgctcttgaaacgattcccgggattccgagcgtttgcccctatgctgcgcactcctgtccctccttgtctgtctgccaagcccctacccatttgccagaagcctgaagtctcatgtaaccctgacatcctggggttttatttgagtaacacaaagtctagaattaattagtgcacagctgttttgttcccacttgtttgcaaacatcctttattctcttataattattgtaataacattcaactcttttcttttggcagcgagtaacttttgcgaaagcccagcatttatgggtgaaaagtgctaagccctccttgtttgtcagtctctactaaagtgggaaatagagaagttcaaatgctttggatgggatatcaaattgctaatcacgtgcggtctgtgtgtcttccaaatgaggagacctataggttgagtcttttcccatggtgttggtcgagggagtattaatccaccccggtgtactgcagctatgtaaagggtccttattcatcccccagatgagcaaatagggggcagggtccttgtccatacccgcaatattgtaaggctgtggactccccctctgcttgggtttatctagacacttccatctttgctctgtagccttaggcaactgtttaacccttttaagccttaaagtttcttcctccataaagtggggataatagttttagctcatatgttactggagaatgaaatcagataattaatgcctagtatgtagggaatatacaataaaggtgagttgtagttattatatcattatcaaaaagtagtaaataatggtaatgctgggcattgtggaaaagaatagtccagaccagcatggctccctctcagcagtgccgtgcacagaggcagcagcaggcagcagtcggcttggcctttctgcagggcatttgtgccaggcctcgccgtggcactcagaggcaggcaggcttctgacattccccgagagggaggagcagagacttttgaaatgtctgaaattgccatccttttattcaaatataagtttttaaggacacaatttttagaaaactgtgattgtatataacttctctaacgggtggaataaacatctttatttttaacaactacgagctttataaacaagtagtaggaaagataattctttacatttgctaatatgtcataacaggcacaaaccgaaatacaattttagactagcagtgtataaaaatactttttaaatagtaattttgataggtacagtagcacttgaaaaaacagctgtgtagttattccttgtgaggacctactaaaacaattcgatttactacccccagctacaactgaaagcacgaacctggaaaacaagttctcttacccaggtacacaccacacatacctgcgcactgaaacaacctccagcctccgtctatggtgcacaccgatgaggcgtccttctcaaacagggcatgagatggcagggtttggagcctgttgcttcttggattttttttttttttttttttttttttttgagacagagtctcgctccatcacccaggctggagtgcagtggtgccatctaagctcactgcaacctctgcctcctgggttcaagcaattctcatgccacagcctcttgagtagctgggactacaggcgtgcgccaccacacccgactaatctttcatattcttagcagggatgagatttcaccatattagccaggttggtcttgaactcttgacctcaagtgatccacccacctcagcctcccaaagtgctggaattacaggtgtgagctaccatgcctggccaggaaatgatgtttaatggattgaaatgccttacttgagtccggacgcggtggcccacgcctgtaatcccagcactctgggaggccgaagcgggcggatcacctgaggtcgggagttcgagaccagcctgaccaacaaggagaaaccccatctctactaaaaatacaaaattagccgggcgaggtggcgcatgcctgtaatcccagctactcgggaagctaaggcaggagaatcttgaacccgggaagcggaggttgtggtgagtggagattgcgccagtgcactccagcctgggcaacaagagcaaaactcagtctcaagagaaaaaaaagagaaatgccttacttgaaccttcttgcttgtagactggcatgaacgtttttccatctttgtttcttaaaaacctcaataggacagaaagaaggaagcccaccttatcttttccttttgtagtcactcattaagttctctgtggcttgggcccttgtcccatcaacagtgaagacattgggtcagtcgtattggtttgtaactgaggagaggtgaaccagtggtgcccgctgtgtgtgcagggactctagtccccaggaaggcatgtcgagtgtcccctgtgtcatctagggcaggtcacagcattcagcgaggtgactcagaaatcaggcccctcgtagtatcccagagggggacacgttgacaatgtttcctttcttggggttcgaagtgaggtccctgctgttctggaaacatagtctctgtccatccaccaccacaaagtaatgctcctcctttttatttttatttttttttttttttgagacagagactcgccctgtcgccaggctggagtgcaatggtgcggtctcagctcacagcaacctctgcctcccaggctcaagcggttcttctgcctcagcctaccaagtagctgggactacaggcgcgtgccaccatgcttggctaatttctgtgcttttagtagagacgggggtttcaccatgttggccaggctgatctcaaactcctgacctcatgatccgcctgtctcagcctcccaaagtgctgggattacaggcatgagccactgtgcccaggcagtaatgctcctcttaagaaagaaagcatttggccgggtgtggtggctcacacctgtaatcccagcactttgggaggccgaggcaggtggatcatgaggtcaggagaccaagaccatcctggctaacacagtgaaaccctctctctactaaaaatgcaaaaaattagccgggcgtggtggtgggcacctgtagtcccagctacttgggaggctgaggcaggagaacggcgtgaacctgggaggtggagcttgtagtgagctgagattgcaccactgcactgcagcctgggggacagagcgagactccgtctctaaataaataaataataaatgacaaaaaaaaaagaaagcatctgtccctcatcatgtcaatggtctgtagcagtcagatgcgtttctggacatctctgtgctgtgaaagagcaggtgaacgggaggctggggctaccacacatgcctggtttcagctgatcagggctgatttatggccaagcactcactgttctttgggggaagagagtctttatatttgatacttaagcagagacccaatgaccttgtttgtttgtttgtgacagtcttgctctgtcacctatgctgaagtgcagtggtgcaatattggctcactgcaacctccgcctcccaggttcaagtgattctcctgcctcagcctcccgagtagctgggattacaggcacccaccatcatgcccagctaatttttgtatttttagtagagatggggtttcactatgttggccagactggtctcgaactcctgacctcaaatgatccacctgcctcggcctcccaaagttctggattacaggcgtgagccaccgcacccagccccagtgaccttgttttaaggacatgacatggaattcctggaaccgggatccgttttgaagagtcagtggtcctaagttgtcatcaggcaggggaccaggttctgctctgtgcgttggcctctgctccagcctgtgcaggctgtgtggacgagtgccacctgcatcagcgggcacctcgcaaggctttgttgagctccagtgagtagcccacttccatctgcccatctggcttggactttctgtacttatcttagtcccatggctgtgctcctgcagggccaggcagatgatggcagccgacaatgtgcatctcaaagggacgaccacccgaggaaggatccacaggaaatgtcgcagggggtgggtcgtgccacagcccctggaaacgagccaggatgttgcccttgatcttgcctgcattctggctttgcacattgagggagctgcttcggcccttcccttggtctctggctgtttgagctttatatagagagccgagtaggagtcaactctttggggctgtctcttgtgaagtccttcttaccacgcgccatgcctttctgggcagtgcggctgcatctttcacacatggctattctcttagcagtttcttaccctgtacagtttaaaaacaaacatcttacctaacctggagtgctttctacatgcccatgacacctttctccttacagaggatgaagaaccacggaaaaacttggggctccgatattgcgaactccctaaattctcccacctcctttcccacataacctgatgctcagcctactgctgacaagcgtcagcccagcggaggcccgtctgctctgccttcgtcatttctagtccccttcggttatgtttcatgttcctcattctcacaagaaagaatcccttcccttctacagatggacggcccgtctgtaggctggtgccatccttcgaggtcagctggtgatacacactgagagggaacctaggtccagaatgtgcttgtcaggaagggtgtgcagcccagggttctctccgtgttcactgcctctttcctttgtcatcttcattctgccgttgagcctatctagtgggtttttacaatttcagttactgtatgtttagttcgaagttttccatttggttctcctttataccttctgtttctttcctgagacttctcatcattccctttatgttaagaatacccctccttacttcttggagtgttttttgtaatagctgctgtggagtctgtcagctaattccaatgtctctgttagctcagataagatgttgatcatcttttcccatgcgagttgaggatattcaccttctttgtatgctgagtggttctggattggtcctgaacattctgaatattacgttaggaagctgtggttcctgattcagtcctctggagagttgttggtagcttggttgtggcaggcactccaccagcttgggttcaggttctcagtccctaccattctgctgtgggttttggtgccgttttccaagcctttgtccactcttcagatctgtccactatgtagcactccatggcctgtgtgggccccgggcatgctccgtcctaaccttcagtgctcagggtctgtgcttgagggctctgtttacatatgcctcgctcagggctgagcccaggagctcgtaacaacttgatggggttgttttcccgagagctcctccctctctgcaatctctcgagcactttccggtttcctgggcctcctatcttcaccccttcagccaggaggcagggcttcagttatcagctctgccacgcttctcccgtgactgagcttacttttgtggccaagcaagaagaggacacggagaaaaaaagccagcgggtttttcaccctctttggaccaccgttcctccagctggaaaggaaggtttcctcagagcttcagacacctgcaggctgacccctctgctggcactgtcactgttgccaccactgccgctgtggaatttcctggggaccagggcaccagagagacagggagaaaggaaaaaacccagggatctggcccactgtctcagaaccaggtgacccctttcctgttactagatgcttctcctggagcccccgggcacactcttgctcgcctctggatatcgagttgtatttagtccaggctggggataccagggtcagggacatggcaaactcaccgcaaccttggtggcacttcaaattctggtcttcaacccccttctacctgctactggtcaattctcagaggcctcagtagctcctttgtgtgcctgtctagccttttagccacattcagtgggcagggaagggtggcgggggtggtgcttaccctgtggagtaaccataaggaaaccagaaccataaggaaatgagaagatgtgttttaaaggccttaaacagaaacgtctgggattacaaacagaaatgaggaagtcaggaataaagtaaagggtgaatgattaggtgagagtgagcagaagcgcctgatatgcaggatcctgtgggcctctggagcccatcccctaactccctcacccatctttccatgtgcaccttgcagagggaggagggaagccctctgcacccaccccgccttccaggttgagacaaaggcttcgaccgtcagcacgcgagcctatcctttccacggggagtgtcagaaaggtatcgatggagacatggaaaggggtttctaagagtcaagagtctttaatgcatgatatcaagtgtctgtatccaggtagtcacccatgtgcagagcctcatgctgcacgattggatctgggcttgataaagaatttagtgtctcaaagcagatctctctctctctctctctttctctcactctcaccctctcccccctttttttctcaaaaaacaaagcttttattgcaagaatgattctggctctgttaaaagactttctgaagctggatgtggtggctcacccctgtaatcccagcactttgggaggctgaggtgggagagttgcctgagccctggagttcaaggctgcagcgagccaaggttgtgccactgcaccttagcttgggtgacagaacgagactgtgtctccaaattctactaatgatgataataatactaatcaaatattgttaaacatgtatcaaccagataagggaggatttcagaagaccacaaatgacctgtagaaaacagtagaacacaataacaatcttccgatttctccacattgaggggcaggttttgggttggccacagcccagagggaggtggggagtgtggtggaaattaagaaagcctcagcaaaggtgcagtgtgtgtgtgagagggagagggagggaaaagcggcctgattagggcagaagttctttcttgaagacaccaacaccgagtgcttctgtgaggttgctttgcacggtggccatgtcccctctgtcttagctccctgccaaactgcgtgggcagctacaagcagctccagattgcagagcgccttgggccccagccagagatggcaggtgtcacgggtaggcagggacagacactagtggctcttgagcagaaggctcactgtggcccgccaggccatccctggatccaggaggatttgcccagtctttcctcccatagaggcatggatgtcctcagtgcacagctgttagctttggcccttcatggggccagcgggagctgagcaccaaatccaaagacggtggaggttggttccgttccaccctcacctaccttgggttctgatacggtttggttctgcgtccccacccaatctcctgtcgaattgtaatctccagtgttggaggtgggaggtgattgtatcacgggggcgaatttctcatgaatggtttagtgccatcccccttggcactgtcctcgagatagcgagttctcatgagatctggttgtttaaaagcgtgtggcacctcccctcattctctctcttgctccagctcctgccacgtaggacgtggctgctccctcttaaccttctgctgtgttcataagtttcctgaggcatccccagaagtcaagcggatgccagcatcatgcttcctgcccagcctgtagatccaattgaacctttggttttattctttataaattacccagtctcgggtatttcgttatagcagtgcaagaatggcctcattcacattcataaggcccgagtcctgcatctcttagggagcctctccctgtccagtaattaagtgtggctgtctccatgccaaggggttggggcaatattcatttattttgccaaattacttaagagtggaaggccaagtcggtctctgtccgagttgaattcagctgtcccggagtcagccgctgtgtccttttgtgaaagaagtacagcctgtcacccagggagggcgcgccttatggcgggttctaacacgcagttgcaatggaaccaactcagtcaatggtgatcgctgatggtaaacaacccctcaccctgcgctgtctcggtgcctgaaactcgagggcccagccctcgactcaggaattacctaggaccaattaaacaatgactaaagggcaaagtgtaaatccaggtccttgtgtgaggtgacttgagttgggacttaggagaacttctgaaaaaacaagaaatttcaaagactcctactctggaggagctgttgattgatatttatttatttatttatttatttatttttttttttgagacggactcttgttctgtcacccagactggagtgcagtggcgcaatctcggctcactgcaacctccacctcccgggttcaagccattctcctgcctcagccttgggaggctaatttttgtatttttagtagagacagggtttcaccatgttggccaggctggtctcgaactcctgacctcaagtgatccccctgcctcggcttcccaaagtgctaggattacaggcgtgagccgccgtgcccagccgagctgttgatttataaccatggtgtttcttttcttccctccccaatcccctgggggctgactcaccccttgttttccgcagtgtggtagagttgggtttgttgtggagccttgtgcattgttgctgagtcaaggaaggcagaaacagtagattgtgtgctctgtgctgtgaggaatgtatcccctgcactgcctgccgtgtgcccagcacttagcacagagcctgcccttcacaggcgtttacaaatggacccagtgggccaggtgcactggttcatgcctgtaatcccagcacttcagggagccaaggcggcaggatcacttgagcccaggtatttgagaccagcctgggtaacacagtaagatcccatcactacaaaaatgtgttaaaaaattagccaggcatggtggtgcagctacttgggaggctgaggtgggaggatcacttgagcctaggaatttgaggttaacattgagctatgattgcaccactgcacttcagcctgggcgacagagtgagaccctgtcttaaaaaaaaaggaaaagaaaaaagaaaggacccagttgaagccctagttttgtgaggtcgtcttcgtggagaacttaatgcgttttattctcccactgggttggggaaccagcagatggccccttatctctttttttctgtgaactgtgaaccaaatttagatgttttcctcttcccggaggtcataaaataggacctatctttggatatagccattatgacagttttagtggagaagaactgcattaagctttataaaatgttatctcagaagagaaatggcaagaaaccctagaggttcaatggcctctccctgttaataacctgttaacaagcagacatccccattccccttcccgcttccctcaaaaggagaccccagagaactgttccggttggtggtggctccgccttgctggaactcctctgcaggctcagctttccttctgagccacatagaatcatactctctacttcctctcacacagcgactcttacacatttaaagaccaccatcttgtctcccatgttacttacccccatggtaaatttcaactttctcacccttgctcatgtgatatgattattagactccctaacgatgctggcggggtttgtttgggatttctttggatgctctccagattcttggtagctctcgccttttccctctcatgttttttttttttttaagagacggggtcttgctgtgttgcccaggctggtcccaaactcctgggctcaagtgaccctccagcctcagcctcccaaagtgctgggattacaggcataagccattgtgcctggcctcctttcatgattttttaagtcttacaagcacttattaaatgaaaatgcctttgcaaggttgttatcctttctaaaacgacgcattggccaggcgcagtggctcacgcctgtaatcccagcactttgggaggccaaggcaggcagatcacgaggtcaacagatcgagaccgtcctggccaacatggtgaaaccccgtctctactaaaaatacaaaaattagccgggcatggtggcacacgcctgtagtcccagctgctcaggaggctgaggaaggagaatcgcttgaaccctggaggtggaggttgcagtgagctgagatcacgccactgcactccagcctggtgacagagcgagcaaggctctgtctcaaaaagcagcaacaacaacaacaataacaacaacaaaaagctagccaggcctggtgtcaggcacctgtaatcccagctactcgggaggctgaggcaccagaatcgcttgaacctgggaggccgaggttcccaggttccattgcatcgtgccattgcactccagcctgggcaacaagagcaaaaccctgtctcaaatcaatcagtcaatcagtcaatcaatcaatcgatgcatcctaatgggtttctttgggcttaaggtttcaggatagcaatgagtatagattcttggacgtggctaaccacagtattgctgtggaaagttgatcatttctcctgaggcatggaattgaacagagtgttccaggagcagcctgaccagcagaagcagagtgaatggcatcatcactgtggtttgggggcaggtgcttttgtccgtgcatctgaaggtcggttcagagtttgctgttttcattagttccacatatgttgactcagcaagcgcgccctcaagcagtgagctgcctctcagtatcgtgcttgtgtaacttcggatcaaatttttatttttatttttattttttttattttgagaccgtctcgctctgtcacccaggctggagtgcagtggcacgatctcggctcactgcaacctcctcccaggttcaagcgattctcttgcctcagcctcccaagtagctgggattacaggtgcccaccaccacacccagcgaatttttgtagtttttaatagaaacagggtttcaccatgttggccaggctggtctcgaactcctgacctcaggtgatccgcccacttcagcctcccaaagtgctgggattacaggcgtgagccaccacgcccgacctggatcaaatttttagataacctcgctagtcatttatgagttattggaaggcagacaccatgttgtttctacatcatgcctgatacacggaaggtactcaggaaacacccagcgaatgaatgaatttcccagccagaggcatcttttagacccagcgcattgctgcagcctgccaaaatccttttgggtctcgattgtgtcattctgtaagttaactgtatctcttggttttatgttcccacattctctatcaacatgttgtttgcattcatatctgaataattaatagggtgtaaggataggcctggactagagtttgccccattagggatggagacatctttccaggttgactctctggataaggcagctcagctatcatgttttatcaaacttaacaactcatcagtcctaagattcatctttattttatacattactaagaaagattacttgagcccaggagttcagaatcagcccaggcaatatagtgagaagttgtcactacaaaaaaatttttaaggccaggcgcggtggctcacgcctataatcccagcactttgggaggctgaggaggcgcggatcacaaggtcaaaagatcaagaccattctggccaacatggtgaaaccccgtctctactaaaaatacaaaaattagctgggcatggtggcgtgcacctgtagtcccagctactcaggaggctgaggcaggagaatcacttgaagccaggaggcagagtttgcagcgaactgagatcatgccactgcactccagcctggcgacagagcaagactctgtctcaaaaaaaaaaaaaaaaaaaattagctgagtgtggtggcgcatgcttgtagtcccagctactcgggaggctgaggtgggaggatcacttgagcccaggaggtggaggttgcagtgagctgtgattgtgccactgcactccagcctgggtgacagtgagaccctgtctcaaaaataagattaaacactgccgtttacactattacacattttcttatcacttagaatttttgttctatccttattgaaagaatgtcttttagaattacttagacatagattgttatgtgtcaccttggtccataagaaagaaaatataagcaaaataaattggttaaaatacttcgaaagcttcttcacattcaaagacccatatttctgaagttatctcagtgccattgaaatctgtgtttcttttttttctttttcttttcttttttttttttttttttgttgttgttgagatggagtctcactctgttgcccaggctgaagtgcagtggccacatctcggctcactgcaacctccacctcccaggttcaagcagttctctgtctcagcctcccaagtagctgggattgcaggtgtgcaccaccacacctggctgatttttgtatttttagtagagatggggcctcaccatgttagccaagctggtctcgaactcttgacctcaaatgatccaccctcctcagcctcccacagttctgggattacaggcatgagccaccacgcccagccaaaatccatgtttctgtacagtatcatcctgtcgccagcagtgtgcccttcccagaatgtgccatccatttacctttggggaggcctaaaggggatggcaatgttgtacgtcctggcgcgggtggtggctgcatggacgtattcgctttgtgagggttcattgaacggcatcgttatgatttatgtattttctgtatttcattttatttttgaggcagggtctctctctgttacaaaggctggagtgcagtggtacaatctcggtttactgcaacctctgactcctggactcaagcagtcctcccacctcagcctcccgagtagctgggactacaggtgtgtggcaccacgcccagctaatttagtttattttttttagagacagagtctcactgtgtgcccaggctggtctcaaactcctggactgaagtgagcctccccgccttggcctctcaaagtgctgggattacaaatatgagccaccgcccccagcctctttttgtggtttttttttgtttgtttgattgcttaaaaatagaaaaggagtgtccactcttgtctctagacagtaccatgatgggctggttgaaacagtggtaagacacatgtgatttcagatatcttaaagtgcaaaagaaaataagatgcattttaggataatgaaatacaatatttctaaatccatgaaattacacattgtttaggccatgttctgcctcgtcttcaaagacagaaagtgaaagtgaagtcccttgctaaaactcagtgtactgttctacaggacaggacaatctccctgatctctgagtctgtaacaaacacacacaaacaactgcagggcttagtctggcaccagctcttgacctcagccctcaccacttccccttcttggtgcttgcagagtgtcgtgttggtagcctctttctagacacctactgacatggatatcttacttaatctgttgcacagaatccgccaccttctccttttgaaatgaggtttccatttgcccttcttctcacctctcccccagcctgttatcttggttttttcggagatgagaaatcgtgattcagagagttcctctgtaaagcctgtgagttgtaattcatcagtgtgacagccgagtgctcggagccagcctcccaacaagcgtgggctctcgggcccactcaaactctaagctggtgcttgggtggtgctgcggggcaatctgtgctttttctttccctccagtgtctcccccagtccccatcctggccttgccagtgctgcagctcagcccttctctgcactctaaatggttctgtgctttgtttgtgcctgtggttcagcccagacccccctgaaagccacagccagcagtttctcctgtccatgtgagaagcacgtgccagcaggcaccttgaactcaggatagctgggggttggttgcgatggacggcacgacggtctgcagtggggatccaggatcccagacatggatcctaaactgccataggagccatgccttcctaagcctcccaccctttgctccttcccatcagcgcggcgttagaaaagcccgcctttccgaggccccctctcaacaccgccatgagaagtctttcaaacgccctggaagttaggttcaggagaagcccgtcagtaagttccccatcataccacactgcagcggtagctctttccattccacagaacagcagccagagggagccagggcagcttcacagcccaccccacgggaaatgcctgactttctccatgtgggtccctctccaggaaagcctcccttcccagctccacttaaaacccacccagccttccaagacacagttccccaagtcttccctgagaatctccttgccattgggtgtgctcttgcattcctccgggccgcgctcgccgagagccctttgttcactggttacggtgctggccccctctgctcaattgcccaattatttagatgcttgtcttcttgttttgaggtggggtctcactctgtcacccaggttggaatgcagtggtgtgatcatagcttactgtagccttgaacatctggggtcaaggaatcctcatgcctcagcctcccagacagctgggtactataggtgcatgccaccatgcttggctaattatgttttaaatattttgtagagacaaggtctctctttgttgcccacactggtcatgaactcctggcttcaagcgagcctcctgcctcagcctcccaaagggctggaattacaggcaggagccactgcacccagccgagatacttgtcttatttttcctactgggtgtacagtgtctgaagactgagtctgtcagttgttcttgtttgcgcagtgccctgtacatagcacctccacagaaagcatgtttgtttgcgagtcagctgaattgttgaatgggtttttctttgcctcctgggttatattgtaaaccccctgtggtcaggaattgtggcgtgtacactttcatgcagccgagatgaatggcgtagagtccaggctgatgcattttattgatcaaaagaccagtaaatgatcatatagttttttctcctttcagttacaaaataaatcagcagcagggcattttactgacagtcttccttaaactgtttctcccccatcaccaagtgtacagggcgacgggaggaggtgtgtggtgtgattgggcccccagtggctggactctgcaactgaccttgcagactatggcaggtgtggaggaaggagcagttcagatgcagcccctttgggtggagctcacctttgctggcactgtgagttttcaaccaaaacacattgacaacatctcttatgggcctgaccctgttccagtcccgggaatactgcagtgaagaaaacacacacgactcctgactcccagggaacttgtgttggtggagtattgtcctgggatcttcagtcctgggccacgaggaggcagtcagccagagctagcccgtatgccagtgcctggtttagaggatctccactggagaggctgcctctgctttttgtttttgttttttttttttttctctctctctccttttacctttcctgtggtgctgaggctgcctctttcaagccagcacctgtgagtaggtcattctgtgtgggacctggtgtgtctgcacacggcttggtgtgggctggagctgcccccactgccctcctcattggtgaccccaacatttttgtctttactgggcagtgctccccacaggagtagcccctacatatggctaagatgctgctgctgtctgtgtctgagggaataaagccaggctcttatgttcacagcagaatgacaattctccctccccggtgactacagcacgcggatgctattttggttatcaaatcagaacctcggcacttcaggccctcttcagagaattcaggcatgaatggtctgtggtctgacacttgtcaaaagccctactgaggcatctggcactggaggagaggcaccctcacgggcatgttcactgtcacgcctcatgtatcagggagctcttctcttcacctagtagcgggatccagccagacaaatacctgtaccaaattgatttcatgtatgccttcagattttttgagagtcttttaaagaaatgcctgttttggccggacgcgttggctcatgcctataatcccagcacttagggaggccgaagcaggtggatccctgaggtcaggagttcgagactagcctgatcaacgtggtgaaaccccatctgtactaaaagtacaaaattagccgggtggggtggcgcatgcctgtaattccagctacttgggaggctgaggcaggagaatcgcatgaatccgggtggcaaaggttgcggtgagccaagattgctccactgcgctccagcctgggcaacaagagcggaactccatctcacaaaaaaaaaaaaaacacacaagaaaacaaacaaaaaacaacaaaaaaagaaagaaatgctgatttcaacatctctttaccttttatagatcttgttagagaccttgtcatcacagtaatcagtgtcattgcatacgaagaccctcctgacaagtgcatttccaaattcagtatctgcagaaagctactctgcagatgaatttgtcagatcaagagaattttatgagcaaggatgcttttcttttttgctttggctgccaagaaactcaactaaatctactgcccaactgccataatgaatttggttgattccaccgtctcgtagttgctctagatccatattgactgagtataaatctatgtctggacagcaacgcaaacacactgacattggatttagacacacacatctaaaaggacattgaaatttcctgtgacttgacatggactgttggaccaactattagaccaactattgcttagtagtctgaaacagccaaaaatctctttttggctcagatagggtgtcatcaaaagacatgtaaacatgacctcatggtagaagtgaactgcttcaagctagtaatgtgctgtcttgcaggtatccagtattgctgtgtttccctcaaaaaactgatctatgctgtggtgtccctataactttgcttaggtgttctgggggtgccctggtgccagtttgggaaccacaaccctaggttaaaaacattctcagccccttgagctgtgcctcatgtagtgaggatttggggttccccctgagccaggctgtctcctctagtcataggaggcagtatccagctaaggtggctccagaaaagagtggggtgcccgagtgcgaacatgacgcttaagatgctatcagatgccaggtctgcctggaggtggtccccgcacacacccctcttctccagccccacgtttctcatctctcaactgggagtgaaagcaataatactgcctcagtggtgtgaagttgttctgaatgaaatggttttgtgtagtgctgcactttgaaaggtatgaactgctctgataatagggtcattgatttctcctctgagctgtctcatgttagcatggccagggaagatcttcagcttcgcccttcgagctgggaggaccataacctatttccccaaagtgtttcttctaaggcccttcatgtagtgcgtcacttcctgtgataatcctactgattagggaaaagagcaattctccttcacatttttcaaagaggaaaactagggtacagattcaaatgatttcccagtttgattttttgtttgtttgtgtgttttgttttttgagactgagtctcattctgttgcccaggctggagtgcagtggcgctatcttggctcactgcaacctccgcttcccgggctcaagcgatcctcatgcctcagactcccgagtagctaggattacaggcatgcaccaccaggcctggctaatttttgtatttttaatagagacgggatttcaccatgttggccaggctggtcttgaactcctgacctcaggtgatcctcctgcctcagcctcccaaagtgttgggattacaggcgtgagccactgtgcccggctttcttaggttgatttgtgatggagctgagactcaaggacgaagaggcgcatttttccttgtttgggctgccagggagttggcaaactaggtactttagtcagcggtggagaggagggaacttcaggcctccctcagagacacaggtggtgtctcggggtcccggtgccccatgtgcacagtgcacctgcccttcctgcacagcacccttcacggacagcaggagcaaaacccagggaccccagctgtgaggctggggttaggtgatgtttccaccttacagttgaaatgaaggtcaggccaggcacggcggctcacgcctgtaatcccagcactttgggaggccaagttggaaggattgctggggcccaggagtttgagacaaatctgggcaacatagtgagacctcacctttataaataataataataataagttagccaggtgtggtagcacatgcctatagtcccagctactcaggaggctgagacaggaggatcacttgagcacaggaggtcaaggctgcagtgagccaagattgcaccactctacttcagcctgggcaacagagcgtgaacctatctaaaaaaaaaaaaaaaagaagaaagaaaaagactgggcccagtggctcacacctgtaatcctagcactttgggagtcagaggtgggtagatcacctgaggtcaggagttcgagaccaacctggccaacatggtgaaaccccatctctactaaaaatacaaaattagcccagcatggtggcgggagcctgtactcctagctacttgggaggccgaggcaggagaattgcttgaacccgggaggcggaggtagtagtgagccgagatcacgccactgcactccatccagcctgggcgacagagtgagtctccgtctcaaaaaaaaaaaaaagaaagaaaagtttcaggtaaaagcccaccaagtatatattgctgcagacagacttttggcaaagtaacttggtgattcctatcacaagccttaataatgcgcacaccctttggccagcaattccacatctagaaatgcctcctcaagcatctgagatgtcgctgtaagaggtgaggatgacgtggggatcagggcccctggttctccagctgacctgtgtgcgggttccttgcccggtctcttcctggcctctccccgccttgccttactgcagcttcaacaggggagacaatccaggtgcacatgcgtgtgatgtgtgtgtgttgtgtgttgcctgaggttttgcacactctgggtgagaggagcagcacatttgggagttcttggggacacgaaaagagaggagagtcttgaggttgatgggaaggggcaggctcacagaaagttccagattctccctgcagggagctcttgtctgattgcccaaggccaacctgctggagaagccacagctctggttgttccgggatgctggggaaatcagtgtgagcacagctccatggggaagtggcagagcagccacaccggggcaatctcgtgagttccttctacagctggaggctgctgggtgggaagaagcagtgggggaagtggggcggaaggggttgcagcaggaggttaggaaaccccctccagaatacagaccgctgtggcctcttttcccatgagcggtggctccccggcctcattggccttcccggttcttgaactttctaaagtggttaccttagggcctgcatgcttcatgttccctctgcctgggtcaccttcaagccttttcaatgctggttctccctctttccatctcagctcagaggtctgcctccccaacctccccgtccaaagaagccacttctcagccctctcaggaccatcaccttcagatcgtctctgtagcacttagtgctgcagaagctcttgtttggttttttattctattaactctatcttcccctctccctgcccctggtacgtacgtaaacacacacacacacacacacacaccccataaggtctcactcatggcttcatttctagctccttgcacagtaaccgatgcatagtagatgctcagtacatgtgtgaagaatgactggatgtttgcagaatctcataagggctttggaaggtacaggttgacttagaattttagcctaatttggttggtggaagcctccatcatggggcctacgatgcgaattgcaaagtgtaaccgcaggggggttgcagtgcttcaggcccgcaggccagcatgttcctatctgcggtgacacagattcccctgtggccaaaaacacggtttctcagagtctggggacctgcagtgggcctcagtacctccttgaatgtagaacgaagcagatgggctgggatgcaatccacagatgggttttttgactcccagcgtgttttgaaataaatttaaattagttgccagtgttgaaaaatcagaagatttcatgtaacgggatttcagcattccttagaaacctgtagaagctctgatactcctgggtctacattcccaaatggtagcaccgggctggctctgagcagggacagtgtggctccttgctggaccacctcctctgttttcgccagatggccaagactgtgaccctgcaatgtgagagtggccatgaccttgtcctgcctagaggcccacaatgacctttccttcttagaggaagagggtggggttgcttcccttgccatgactacacacagtcactgctgtgacatcttagatctgtgagcgagccccagacagctgagatccctgagctgaggggtccggggacaggggtggtgcacgccacagctatcggcgtgcaggaccagccctcctgccacccatctgcttcctctcactctgtgcctctcctgtgatatcgcctccgtgctgagcccacggaggaaggcggcacccagcactcagggcttctgggagagggtgactcacgagagcatctgaacggcccaagagtgcctgaggctggatcagaaatagccacgatcgtccagtttgattgattgattgattgatttagttgtgatggagtctcgctgtatttcccaggctggagtgcagaggcacgatctccgttcactgcagcctccacctccccggttcaagtgattctcctgcctcagccttccgagtagctgggattacaggcacctgccaccacgcccggctgatttttgtgtttttagtagagacagggtttcgccatgttggccaggctggtcttgaactcctgacctcaggtgagccacccgcctcggcctcccaaagtgttgggattacaggcgtgagccactgcccccagccccagcttgatcttgaacctcctgtgtgtgggcagagagacatggccctgctactgcttgaacggcttccggagacagtgacttgtttcctttttccctctgaactgtgagtgtttgccatgcagtgttaggataatgaacaaaatgaaagaggaaatcaccctgatgccagcaccgccagccatttctacattctttcccatcgcttttgcatatgtatacatgattgtaattagagtaaaattaaatttctctcacttcagtattcgcaggcctctgaacagggggtggcaagcaggagcactcagtaaaccttggctgaccgaagaatattctgtttacttcactagaaagtgaacgttttctgaattgtatcatacactgatcactactgcaactttttcacatgtatttaccattttactatatttatttatttacttttttttttttttttttgaggtggagacttgctctgtcgcccaggctggagtgcagtggcctgacctcagctcactgcaacctctgcctcccaggttcaaccgattctcctgcctcagcctcccgagtgtttaggattacaggcgtgcgccaccatgcctggctaatttttgtattttgagtagagacagggtttcaccgtgttggccaggctggtgtcgaactcctgacctcaggtgatccacccgcctcagcctcccaaagtgttgggattacgggagtgagccaccgtgcctggcccgttttactatatttaggtattttttctacccatctccccagttagtcaggattataaatactgttgcaatgagcatttttctctatgtaagtttttgtgtgttttgaattattttcttaggataaattccaagcatttgaattcctgaatcagaagagagaaaaataagaatgatagaaattgccttttgaagtattatctctccctattccagcagtgtttgagaatgttaattttaccataactttaccagtatttagatagtttttaaatttttgctaatttagaagtatgggatggtaccttgtggctttaatttgcatatttatatcgtggttattagtatgggttgaagaattgtctacgcctttaataattgtatttcttttttctttttttgagacggagttgtgctgtcacccaggctggagtgcaatggcaccatctcgggtcactgcaacctccgcctcctgggttcaagtaattctcctgcctcagcctcctgagtagctggattacaggcaagccccaccatgcctggctaatttttgtatttgtagtagagatggggtttcaccatgttgcccaggctggtcttgaactccagacctcaggtgatccacccgcgtcagcctcccaaagtgctgggataacaggcgtgagccaccgcgcccggcctataattgtatttcctcttgcgtgccttgcctatttgagtggtttgtgtagctgttagaatatagactttttagagttgtgtgaatttgtagtacagacagcactagcttaatgttcctactatatttactgtaaacattttactagtgtgtggtttttcatttttaatgccgggcatgttactgtgtgtgtggttttctgttctttggtgagtgagaatgcgcttgtggaagggccttgggtttctgatccaatcttgatgcctcggccaggggggacccatcagagactaggcgccctggccggggacgcagctggcgaggggagaccccgaccggccactccttgctctccaggtccctgagctgtagccactgccttttgagctcatcagagtccttggtgctgtcctggcctggaaagttctactgagctgaggtttatgcttctctcttgtggacggaggcttgctttgcggggctcccctgaacacgcctagcaccacgctggtgacctggaaccagccttttctctttctgactcagggtatttaaaaatatcccaggctggagaatttggaggaatccatcatcaatgggtgagcattaagctcttaagaggcagaaaaggccattctgctattgaattgtcctctgaagatgcgttcagttcagcagtttcacagccacctcactggcaggcattgtcctagatatttggggtctaacagggacagggctgtggttagaggtgtgctctgctctgaggggctgtcaggagggcgtctccttcccgcctagctgtctgcctctgtactggtgaggaaggttccccagtaccttctaaaccagcagtcaggagacctgggttagaagcgaagattcagatcccagctctgccaccctgtgacctatgtagccagctcccctgaccctgtgagcatgttcacaatccggtctgttccttcgttcagcaagcacacgacacacatgcacgtagtcaggagtcctcgctgggcacagcatggctacggtggtgccagggcatggtccctctggaggggcgtatactttacgggtaaacagagatactggtgtctgtcagtaaagcaagcaggatgatgaatgaggctgaataagatgctggagcccacagaggagtcagtcattcatgttgaataggagcagagtggagcttctcagaagacgtggccgaggcagaggcttgaggggtgaatagaactccagggtgggaatggcggaggaaaaagttggggaatggagaagggagagggctgcccaggctgaggagccgaggggtgtgtcgttgtccagcggggctgcagtgctgggagaggggacaggtccagatggcaaatgttgtgcttagcaaccatcatagggtttgagaaggatgctgagaggagatagacctgtgacagtccgggaatgcttttgacgagaacagagcccaggaaggaggaggtcagagctcaggaggtgaggtgtgtcttcctcagtagggaggttcttccgtagccactgattccagtgacagctagcgggcaggtggattgtccctggtgatcctccgtttccagcccaggatgggccttttctgtcctggcgatgggctcagtcttggggctggagcggggaggaggccagcagaggccgtgtgctgacagtctgaaatgctgatgtcagtgtttatttgttcattcatttcacaagtatttattgaggacctaccatggaccaggtgttgaacagtaaagcggacagtaggaagatgatagcaaagaggcaccccaaattccggaagagcagagattctctttctggggagtctgtgatctaggtcgggattctggtgaggagtggcgctaatgtctgtgtctgtgtttccattctagatgccgtagggccaggtgagctgctgtgaaggactcattcttggtagccggcagttactggcaacttgtgagcttggtgggctcctactaacgcacctgggacaccaggctgctgggctcccctctaggcagcctcccctccaggcagcctcaccagcagctcccctgagccatggagaccccagaggtccccgtgggctcgctaatcgactttgggcctgaggcacccacctcttctcccctggaggcaccaccccctgtgctgcaggacggcgatggctccctgggggacggtgcatcagagagtgagaccactgagtctgcggacagtgagaatgacatgggcgagtcgccctcgcacccgtcctgggaccaagaccgccgttcctcctccaacgagtccttctcctccaaccagagcaccgagtctacccaggatgaagagaccctggcactcagggacttcatgcgtggctacgtggagaagatcttctctggagggtaaggggcctgtgtggacgagacagcctggtgtggccacagggcccaaggggactcgcctcctgctctcggctctgcctctccccagggtgccacctgggaccagagcttccatttccccatcagccaggggtggcgactgcaggggcctcactccactccaggctgcatgcagagccacgtggagaactttaaaagaatacctgagcctggacttcactccagaccagttatatcagttctctagggtgaggcccagcatcaaagtatgtgcggctcccaggtgatttggaagggcaaccatgcagagaatccctggagggacacgctccggagtgcccagctcacaggtccccatcatccccgtgagctccattatgttctttttgtttattttcttttctttttttctttttttttctttttttgagacagagtctgggtctgtcacccaggctggagtgcagtggtgcgatctcagcttaatgcaagctctgcctcccaggtttaagtgattcttctgtctcagcctcccgagtagctgggactataagcacccaccaccacgcttggctaatttttgtattttcaatagagacagggtttcaccatgttggtcaagctggtctcgaactcctgacctcatgtgatccacccgcctcagcctcccaaagtgttgggattacaggcgttagccaccgtacccggctgagctctgttattttccagtgcatgttgttcctgaattttatccacgcattcttttttttttttgagaaggagtctcacactgttgcccaggctggagtgcagtggtgcgatttcagctcactgcaacctccacctcctgagttcaaacaattctcctgcctcagcctcccaagtagctgggattacaggtgtgcaccaccacgcctggctaatttttgtattttttttgttttttttttgagacagagtctggctctgtggcccaggctggaatgcagtggcgtgatcttggctcactgcaaggtccgcctcctgggttcacaccattctcctgcctcagcctcccaagtagctgggactacaggtgcccgccaccacacccggctagttttttgtatttttagtagagacggggtttcaccatgttagccaggatggtctcgatctcctgacctcatgatccgcctgccttagcctcccaaagtgctgagattacaggtgtgagccaccacgcctggccagtttttgtatttttagtagagatgaggtttcaccatgttggccaggctggtctcgaactcctgacttcaggtgatccgcctgcctcggcctcccaaagtgctgggattacaggcgtgggccaccgtgcccggccatccatgcattcttaaacaaggctttggagggactgtctctttcttttccctccgccaacgcttgtctcacctcattgttgctaaacacaaggggcacttgttctgcttgtgggaccatctgagcatgtgtaggctagccactccctagcgctccttgtcacagctatagttggctaagaggttgcaatgattcactgaaattaaatatagggccaacgtaagataataaagctgtggttagccatactggtgtgctcataaggagcagattcttttttagagagacagggtcttactctgttgcccaggctggagtgcagcgacacaatcacagctcactgcagcctccatctcctaggctcaagcagtcttcccaccgcagcctcccgagtagctgggactataggtacacaccaccatgcccagctcatttttttgtgttttttttttttttctttttggaggcaaggtctcactctgtcacccaggcttgagtgcagtggtgcagtcatagctcaccacagcctcaaacttctggccttaagcagtcctcctgccacgactccccgaagtgctgggatgacagcagtgcgccactatactggccagcagctgattcagaagcagctgtttgcatggggcccttccctggatggccgttcttttgtggttcttgagggtaaaataaggagtattgacaattggagcagcaggaagggagagttcggggctgtgacgtccactgagaagtgggaatctgtgcatcagcctgatgtttccctaccccggttcactgcctgttaatatctcagccaggggaaggaggacgcacacacaccccggagccatggggttcaggtgtggattgtggagcttccaccattcacagcagcacactagataaggatggtcttgctgctgtgtcgtgtgtgggccggcagcattggcatctcctgggagcttgtgagaaatgcagagtcttgagccctgcctggccccactgagtgagaacgtgccctttaacaagatcagtagacagttcttacacgtcagcgtctgagaggcactggcttaagggtaagttttccagtttcattaacacaattagaatttgtggccaggctcagtggcttgcacctgtattcccaacactttgggaggctgaggcgggcaggtcgcttgagcccaggagtttgagaccagcctaggaaacatagtgaaaccccctctctacaaaaaaaaaaaccacaaaaattagccaggcatggtggcatgtacccatagtcccagctactcaggaggctgaggttgggggatcaattgagccagggaggcttaggttgcagtgaaccgtgatcggactactgcactccagcctgggtgacaaagggagaccctgtctcaaaaaaaaaaaaagaaaaaagaaagaaattttgcgttttactctgcagagtccattgtttccaccgtgatttgagtcccgcatgtgtaaactgtcaagggctgacttccgccttattcatgggtgcttttcatttgatggagaccagcctcagttttctatgtggttagaaaagagaaccgttatatgataatccaaatatctgactgtctcaaaatgcatttatgggctgagtacggtggctcacacctgtaatcccagcactttgggaggcgaggcaggtgtatcacctaaggccaggagtttgagaccagcctggccaacatgatgaaaccccgtctctactaaaaacacaaaaattagctgggcgtggtggcaggtgcctgtaatccctgctactcgggaggctgaggcaggaaaatcacttgaacccaggaggcagaggttgcaatgagctgagattgcgccactgcactccagcctgcgcaagacagagcgagactccgtctcaaaaaaaattgataaataaaaatgcatttatgtttaatttgagtgcattttaggagagcagatgtagcttcctactcgttttgtttgaccaacactgagatgggtgcgctttctctgagcacacgctggttaacgaaaggggaaaatgcccagaagtttgttcatttgccaggaaagccagcctctatttgcagtagcccatcagcaatacggaatgtggacacctgagtcagatgcatcttcacaagcgttccagaaattactgcaaaagcctgcagatacacatatttcatctgatgctgttattgagagtaaataaggaccaagatgttttctacaaaacataaatgaagattgcataagccaagtgatcttcagccttctgctccatttttgagtctttaaatttgggaaagagtgttggccccttgcaaagagtgatgagaagtggcctgaaatcatgtgagcatgttatccatcctagtggtggcgacaccaagatggaggtccccggtctccatccctctcacacacagcaggggatggcctgaaccatgagcagcctcgctccagaagtgcagagggatgagcgagcgccccgctgatacgtgggaggtgattttcttcttggcctcagaccttggcgtcagtatgctgagacagagcaaattcaggatgtcttaaattcaggggctggttccatgctgacttcagcatcaaaaactagtgggaagtcagagagctggagaaccaagacctcttagggttcgtgcccttatccaggctcagacctccccaggcaggggtcaggaggcgcaggggaaggacatgggctttggaaccaggaaggctggatggaactctggttcaccactctcaagccggcgtgtgattctccaagccaggctcctcgcctttgaaataatagtaacaccctttcctcatgggaccgcccggaggctgagatgagctgatgggagttggggtctgtgcttggctggggaatatttcgttagttccttctccttgctcttcccctgttgctccaggggattgaaaagggttttttttttttttcctctgctctttttttttttttttagggaggacttggatcaggaggagaaagccaagtttggagagtactgcagcagtgaaaatggaaaaggccgggagtggtttgctcgatacgtgagtgcccaggtaagggcgaggtgatgggaaggatgggcgtttactctcaaggaagaatctagtgaagcataacaaatttgactttatcctacaatgacactctggagaaaagagtcaagggaaaggacccaacagtaaaaaaagtaaaacttatccaaaaatactctgaaaaggagtgtttagaatagtaagaaacagtctgggcacagtggctcatgcctgtaatcccagcagtttgggaggccgaggtgggaggatcgcttgagcccaggagcttgagaccagcttgggcaacatagtgaggtcccccctccccgcatctctaaaaattaaaaaagaatagtgagaaacaggaagtagctcatttggatgtcgcacttcaagggaaagagtaagaaactgggctttcaactttatgaaattccggaaaagctcagtttttaaaggcaagcatgtgaattatgtgcgtgcatatttttattaacccataatactcagtgttttgtaaaaaacaaaaaatattcaagaccatgacagccatgtgaagaaaatatattaacaaagtttagaaaagaattaaattttgtaaatatccaataggttcttttttttttttcctgagtggcctaagtttttagtttttgagtattttagtgcaaataatttatttttcatggaaaagttagaaaatgcagatgagcaaagagaagttaattacccacaaatgcacaatttggaaacagccagtgttgtcactgtggggtatctttctgtgtgtgggtgtgtatgaagttcctacttttaaaaatctgggaaggacaccgaggggaacccctgcatgtgccctgcccagtgatggttgggtgcaggtggctacactctgcccgggtcctggcagaaggggtgggttctatagtgcagaggcagcagacatcctgggcccccatcccagctgcatttggaaacactgagagtgcaaagcctgcagcttcactgagtgctgcgtgtgtcgccctgaacctcaatgatgtgtctgcctctttctggacagcgctgcaactccaagtgtgtctcagaggcaaccttctaccgcctggtgcagtcttttgcagtggtgctgttcgagtaagtaatgccgtggcacaaagcctttgtcctggcaagctcctcttccctccctgcctccctccccacccagccgtgtcataacccagctgtgaaccatatccacactagtcatcaggttgcagttgctctgctacgcccagcattcagctaaaaggcacagtcgtgacctccatctcgcgggagcagggctggcagtccttagctggcagcgaatgagagggctgccgctgcgtgtgaggagcatcctctgtgtgggtcctcagggccagatggtgatggtgcactgtggccctgccctccccgggagatctggtactttcccgagttcctattgtagagtacttcaaactcaaccacccaccccactagcatataaacacttaatgatatgttgggaggactgtagctttccctgcgaacactgattaggcactgctggggccttttatcacaggaagcccttggtaggcggtgaggggtggtggaaagggcatggctgccagctggagatttggggccaatcccatctctgcccccgctcacctgtgagattagggagccagaccccatgaggcatagaccctcttctcaggagcatgactctctggggtcaacagaccagcttcatgcctccaaggtgtgaaatggaggggatgcctcttggccttggggaggctgggcagtggcctgaccgacccggagcctcgagaggaggattctggggctgggagccctgatctgggcatatctgtaccccactatcctcgtctcctgcagaaggcctccaagcagtccctgctttgggccccacgtcccctcctggtccttggctcatcccatcgccaccttctcacatcactgcctttgttttgtccttccaggcctgaaaaatatccctcctttacttccttgtctcccaaccaaaagaaagctgctctcttgtgtcgttttttttgttttgttttgtttttgtttttgtttttgtttttgttttgagacagggtcttgctctgtcacccaggctggagtgcagtgggatctcagctcactgcaacctccgcctcccggtttcaagcaattctcctgcctcagcctcctgagtagctgggattacgggcacgcactatcatgcccagctaatttttgtatttttagtagagacagggtttcaccatgtcggccaggctggtctcgaactcctgacctcaagtgattcacttgcttcagcctcccaaagtgctgggattacaggagtgagccaccacacctggccatattccatttatatatacatatatatatacacacatacacacacacacacacgtatatatacacacacacacacacacacacacacacatatatatttagtagagatgaagtcatcaggctggtctcaaactcccgggctcaagggatcctccttcgtcagcctcccaaattgctaggattacaggcgtgaaacaccacacccagcctgctctcttgagtcccagttctcctgcttcatgtctctccactttctctctttctctttgaacttgggcatatactggaagaagaccaacaaaaggagtatccctatttttcctgctcttgctcaggataccccaagtccaagatccatttcccctctgaggtctggccttcagagctggccaggggagggctaagaaaccactgaaagaggttgagtgagccctcacctttggccaagagggcggtggtttaaaacaggccctccagattgccttttatgaaacattctctcatgcaattaagatacttcaatttccgacatttgcagtcacaggcattttcatgaagtcccattttgcatagttctaattctccattttctttctttcttttttttaatttgcactaggctaaaagtaattctccattttcctttgagttttttgtcctatataagtaacgttggggagggaggggattaaagtcccaaccctgccaaaacacaaaaattcttgccatcacttggtccctgagcatatatatgtttgtatagttgcaaaaacaaagtgaaacaaaaacccttttactatttagacaatatgggattttttagttttataatctttagtttgttaaacatctaaagtaaaaagttaatttttacttttagtcttttatagttttattactagtttagttgattagttttttatataaaaagataaaaatggcctttaatcccactgtctagataatttcttttgacttgtaaagtaataattgtccaaggttaaaacccaaacaggaaagaaaagtctaaaagggatcaggatagaaaggcaaagaaacctacaaggcaaaggaatggcccgacccaagaccaagacctgttgaatcagaggctccacctcctgacaccccactgcgaatgctgtgggcgggagcctgagagccagggatgcggggaaggtcatccagcttactgctagttcccgagaaatcaagggctggagggctgggcggcctgagccacgggttttcactgagacttgagggctggcatctcatcctggctctgctcctgggcgtcaagttgagcttcccaggcctgggctttcacctttccagtgaaagaagccgggcaggcagaccacaaactccttcccgttcagaatcagtcccaggccgtgtgcctacgtgtagttctcctaatggaacttggggagattgttttgtgcatctccagtggggaagatattaattgggacgcatgtgtcaagtgtctcagtgatgtctgaccgacttgcaggaagaagcaggtggagcgatctttagccatgagccttgcctcttgtttcaggtgtcatcagatggatgactttgggcctgccaagaacctcatgaccatgtgcttcacctactaccacatcggtaagacatgggtgggctgatgtggggctcacctgaggctagtctgctgataatatggtgtcagaggaagctttcttcatgataaaaagcaaaagctatggggcctccagagaacagaggaagctgatgttagggaggagtgagacttcggagaaaacacagtccgaatcatggggcaggaggttgactgcccagggtacgaaggaaactctcctggggcagtaggttgactgaccagggtgcaaaggaaactcctgagctggtaggagatgagaaaagaaacaagctaggcaggacatttcatggtggaaacaggaactgctggacatgaagttatcagttttatgttttaccaaaacaagacgacacagttggttgttggagggtggtggggaggagcagcgtaggatctgaagctgcagagagttcccagggatgggctggagatggcttatgaggagtgcggactgtgcttgatgctgaggctaggacatctcttccgcctcattgcgttggcactttctcgtatgttggagctcaagggcttcctgcgtgagtctccttgggctgcagcaacaggactcattcaggccaccataggtgggaggttgctggaagcctcctcgtggactggagctaggtcagggaggtgctaggccctggtcccccgtgctttcctctctcgggacccgcgtgctcactcttggggtgtatgtatcccctccccctcccacagccatcctctccgcacccctcagttcagttggtccaactgccatggctggtgtcccagcctcaccagtgggcaggcccttcctgccaggccacacgtcggctgctttgggtggggtaggaaccccccagtacaacctgtggctcctcctttttgaagaacggatagacacataatgaatagacactgcttcctgagacagggccacccacagcagcttcagctagcgaggacaccccactgggacctgcagagggcctttgacctatagtgggcactgaggcccgtgggggtgcctcatcctgtgggggtgccagggcctcatgtccatccactggctaagggagtttgggtgctgcccagactcctcctccaggcccccccccaacccggtgtctccacactcccattccaggggcctggtgcccagctggcttctgcctccctggcactggcatggtcgggcctctgccctcgcctgcctgcagaccctgccacttgggcctcgctcctcctgcttgcatctactttgctccctccctgctcctagtggcttctcagtgcacagcaggtgctgggggcactcacggggagcagggcccccacttcctcatcctgggccggctgagcctgcaccaccccctgtcctcggctgaggagggaggctcccgtatccccactgcacaggacccctgcggggctccctctgggcctctgcagttagcaggcgcataccccagcctcactggcctcgtcttgttccctctctcatccaaggaaaaccacagctgctgcccccggagtcccgggagaagcccgcgggcagcatcgactcctacctgaaatccgcaaacagctggctggccgaaaagaaggacatcgccgagcggctgctgaagaacacctcggccaggactgagaatgtcaagggcttcttcggggggctggagaccaagctgaaggggcccctggccaggaggaacgagtacgtgtggccttggggtccctcccacctgcaggggactggggagaggctggtgtggagctcggacgggggcagcagggagggtgcgggtgaggcccagagactgtcaggaacactgcgctgcccagccacttctgcccccacggcttgctatggtctgcaaagccaagccccccccactgacatgcagggatgtccctgggggccacactccctgggactgatgaggagcccaagggattgtcagatggcagagggaactgcagccctcccttctgtctcctctgtcccctccatcccctggctggaccaacagtgagtgcttgtggaacacggtcttgagtcgcaggagaaaaaacactgtccccaggagagcagggctctgacagacactcgaggaatgctttggggacgggcacatcagaagtagacgcgtagaagctaagacttccacaaggaagagggatgcggcagccagagggagcccccggggtcccctgttcccactcatggctgggccacagccgggtgccttggcctcctcctctaccccattcagctttggattcagagaaaatgacataaagaaacctcaatgccacatttcctgaattctgaaacactggcagttgacaaatagagccttgatttcataaaaggcttttcagagcaagccgtattaaatgtacccagtcccaccttagaagtgtagaacagcgtctttgagttgagaaagtgtggtgtgagtcgcgtgtgtcatcattgtgccttctctccctcagggaagacgagaacaaaccccaggagaagcggcccagggctggtgagtctgcccaggcagcagcaggagacgcccaggccacagcccctcagccagcacacaagcaggtgcacggcctctggggctttcctgcctccacggagcatgggcaccttgccctgggtgatgccccagttgcttcccagctcccgtggttgtattttctcactgagtttctgtggaagagccagttttctcaggaggaactaaattccttatcccaggaaggctaagggttactgcgaggggctgtggccatgctacggaaccatccctcagaagaagtccttattgccgggtgggaatagcaccgttactggctatggctagcagaaaagccacggtggggtttgcatcacgtgtttcagtgacattcggggagaaactggctgctgggaggctgtcacccggggtttgccaacagtgggtgcgcaaccagagctgctttcagccattctctctcctcccacagtgaccgcgtacagccccgaggacgaaaagaagggggagaagatctacctgtacacgcacctgaagcaacagcccatctggtaaggccgagcccgcggcttcccgtcaccctcttactgacggggccagcagtcactccccgggatcacttctagctgcctttgtccccatcagaatggcagaattctcacactcaccagagtggcagaataaaaagatgaacactcacaggcgttggtgaggatgtggagaaactggagctctcctgtatggctaggagcaatgtaaatgagcagccgctgagaaacagtctggcagttcctttaaaggtgaaacacaagagttactctgtgacccagcagctccactcctaggagtcgcccaagagaaaaacatgtcctcacaaaaccttgtacacaaatgtctgtagcaacgtcgtttattatggccccgaggtggaaaccaccttcatggctgtccagtgatgaatgggtaaacaaaatgtggtccatccgttgcatggactattagccagccatgaaaagcaatggcatgctgctccacgctgtagcagggatagacctgggaaacatcgtgaaactcagtggaagaagccagacacagaagcccaagtattgtatcatccctatgaaatgtccagaactgcagattcctagagacacagcagatgacagattgcccgggcagagggtggggaatggggagcagggcgtgactgctgatggggatggggcttctttatggggtgagagaatgttctggaaatggtggtggctgcacaactctgtgaatacactaaaaatcactgaattgtatgttttagagggtgaatttcatggcaagtgaattatatcctaattaagctcttacatatatatacgtgaatggaggtcatggttgaagtgtgagaccagtgttgcaggggaaatcttggccgccctggcatatggcctggctccgcagatgatggtcgtgctgcgttaatctctctgaagcctctcctcgacatattttagagtgctttgctagcacctggaatcagtgtcagacgggccctccctcccctgaagatcacagttggctgtggtgcattttgcccgttaaccaagcaagggttacttgaggagcttggccagggagcgctgccgggacccagagggcagagggcagagggcagggccggagctgtcaggaaggcccttgaggaggctggacccggttcccatggaagcagaggacggggagaagctggcccgctttgtcccgctgtctggtgattcagctcagctcctctgtccttgacttggctgctgtcttttcattgtcacttggcaaacttttctgtgaaaggccagataataaatatgttagactttgcgggccagatggtctctgctgcagccacaccactatgctgttgtagcgtgaacaccaccagagacgttgtataaatggatgagcgtggcttgttccaataaaactttatttacagaaacaagccactggcccgcttcagcctacacaccatcgtttgccaacccctgatgttctttaagaagaatttttctgctgggcacagtggctcatgcctgcaatcccagcactttgggaggccaaagcgggtagattacctgtggtcaggagctcgagaccagcctggtcaacatggcgaaacccccatctctactaaaaatacaaaataagctgggtgtggtggcgcatgcctataatcccagctactcaggaggctgaggcaggagaatgcttgaacctgggaggcagaggttgcagtgagccgagattgtgccattgaactccagcctaggcaacaagagtgaaactccatctcaaaaaaataaataaataaataaaataagaatgtttttttccttgagtatccctatgaacgttagttcgctcagcacacgaggagtccctgcctggttgccattgatgttactagaccctgatgtagaaaagcacaccttcccagccctctgcttcgtcttgggagtcccaacgggaaaggcagaagaagaaaacgacccacctccgtgtcctacagatggtggcttcaactttgcccgccagtgccctcctgcctgcagcgcagcccgggttatcatagctttccctcccacttgcgccatctctcctaagagatacgcagccgctgggagccccagggaaacagctgtaattagatcaagccatatgctcagtttttccttctcagccctacctctctgagacttcttagaagctcagacagatgtgagacactgcccttgtttatccctcaaggggcccacaacccgtgtcctccccgcctccccttggagagagtgtgactggggctctgtcttgcaggcacactctgaggttctggaatgcagccttttttgacgctgtccattgtgagaggacaaagcgatctcccactaccaggtaggagcaaagtgtggccccatttggcctcaggaaaaaggaccagggagtggctttatttcccggtttcggaagaggagagcagaagagcagctgagtggacgtgtctgttttttcttcaccccctcatggccctggtgcctcgcaagctgcctgaggggtcacagcttcatgggtgggggtgctcagcttgcatgagcgctttctgtcctggggctctggcatgacttggcctgaccctcctaaaaatgcaaactcccactaagaccatcaggacccctgctgctgggcccaccctgctgtttgctggacaaaatcagcatcctgaggatgaacgcttggagcagggtcctgggaggaagggctggccaccatccccgagactgccctcgagagctggcgcctggggaatgcagttgccgctcgcaactcacctcttgggtctgcagcctgagcagaccttcccagcttcaccgagggccacctcgcacgtggcagaggggaggggctggcacccaccccacgggggccgatgccatagcaagcaaagctgccgtccaccatgtgcagcgacatgacagcgagggacggcagcccctgggggagccccttccagtcatgtgactgaagtctgaacctctcagggccctggtctcctcattaataaagcacatccctccccctgtaacactggggagaccctctacccttcactcttgtcaggagagtgggcagatggctgctgttggggggaagactcgagtctaccagcacttgccgtgtctcaagtgaaattctttcttctggaggcagctaaaaccctctgggggcaggaggcctggagcattgtgccatggccgcatttcctggggaggcagaggggctcgtggagagggaaagacgctgagactgcccgaggagcctcgagagaccccgctgtgccaggagaccagaacagggacatgctcagatgcccctaggcagaggggcgttgcctctttagttctcagacttctaggaagtgaatttatttcgaatattcctgtctttctctgtcccgctccgtttctgcctgtaataaccctcctctgcttgttctctttttaccatccacatatcttgcatgactttgacatgttcctttgtttacctgtttctgctgccgctccagaggggatgctggagaggaggaggagaagaggtgtgtgtgtccacgtgactttgttccattttacagtgcgggctcctgcgaaggccactgcagggtgggggctgtgcactgtgctgagctgctgcagcaggcacagcccagacgcaggtgcagcctggtggccggcggggagggcggccctggggaggtgaggccagcgctagggcaggctggcaatgcgtcccagaactgggcaggtgggagcctgccaaggccggagcactccgaaatagtcagaaagcaaatgtgacaccttgagacgccctggcgacagcatgagctcgagaggcaaaggcggtgacgccggggaaagcgggctccagttctgagccagccgtgctctccaccagccactccggccccttctgagcagacctgaaagcctcacccttggccttactgttcacactggagaagtgggtcccggctcatctgggaagccacgggtggggtgcagagcctgtcctgtttgcaacaccacccactcttgggtgtcctggggccgccagtttgagggaggcacggaagaaggacacactcccactttcccagccactcggatgggggtgcgaggggcccccgaggaaatccgagaatggggctgtttcctgccagcccacagaggggtctgactctctctgttcccctttctgtgggctcgaatcctttgtgatgtatttttagagtcgctgatctgcctctttaaatagagtccctgagacgatggctcttttgttggaggattcatgaagttgcctcctctaatcagtggtatgtctgtagtgtttattgtcatgagcaatcgtgtttcttatgcagacttacggctttcaaaggaggacttaggcctaacaaacacctcctttcatgaacaaagcccctaggttttcactgactctctgggtgactgtgtgtttaaccagccttccaggaacgagtcagccccacagccctagcccaaggagggctgggagcatcccagcgtcctctgagagctggttggtactgctggggaggggtggtctgtcctgagctcagctgaggggacagctggcctcttgggccttctcaccgaggcagattcgctttgaccacccatagctctgcaccagtgcaccagctcctcatctctgaccggcccctgagccttccccagaagaaggctgaatattgctttgagattgaggcaggtggcagggggcgaggttggctccaagtccccaggcaacctcatgcttccaacatgccatctcttttttggtaacttctgctgacagcaagatgccattatcatcctctctgtgtacagaggcagacgattctgcatttcagaaggtttccctctcagcaggctgttggtcccgtccagattcccactgtagcggtgtagatgcatgttcagctcgctgcccagtgtcagagcttgaccagtactggaaattgaactcttctaattttttttttttttttttttttgagatggagtctcgctctgttgcccaggctggagtgcagtggcacaatctcagctcactgcaacctccatctcctgggttcaagcgattctcctgcctcagcctcccgagtagttaggattacaagtgcccgccaccatgcccagctaatttctcttttcttttctttttcttttttttttttgagacagacttttgctcttgttgcccaggctggagtacagtggtgcgatctcggctcactgtaacctctgcctcccaggttcaagcggttctcctgcctcagcctcccgagtagctgggattacaggtgcccgccaccacacgtggctaatttttcttttcgttctctttttttttttttttttgagatggagttttgctcttgttgcccaggctggagtgcaatggtgcgatctcggctcactgcaacctctgcctcccgggttcaagcaattctcctgcctcagcctcccgagtagctgggattagaggcacccaccaccatgcctggctcatttcgtatttttagtatagacggggtttcaccatgttggtcaggctggcctcaaactcctgacctcaggtggtccacctgtctcaccctcccaaagtgctgggattacaggcatgagccactgcgcccggcctaatttttgtatttttagtagagacagagttgccatgttggccaggctggtcttgaactcctgaactcaggtaatctgaccgcctcggcctcccaaagtgctgggatgacaggcatgagccaccgcacccggcctgaactcagttgtaagaagtgattttatcgtgggcattacctgatctgctactgccagtgaccatttacctctttcttgagacatcaggttaaatgtcccagctttcgtcttcaccatggcaagaagaatcgcctcctcatttggctcaggaagaggaggggtcagggctgctgtgctgtacaactcccaagggagacgttcccgtgtggtctggggttgtgcagggcgcaacctgcacagctgtgcacagcaggcctgcgaggggtgcgggggtttatgtgtctggacaaccctcagggtggctgtttcggggaaagacagtaggaaggaaatgggatgggactctgcagagtacctggaagtatattctggtgtcttcgtgggcatcctgccatcggcacgaggaggctgggagtgacctttgtcagtcacccccatcatgcccctgatgtcctgtgacccctgctaagctgcagcagtgccagtgacctctcgtgggccagggggtggcgaggagccaggagatcatgttcctttgttttgtttctcttcctctggcttctccatgatcccaacctctcaccctctcatacatccttctcccctttctttgatcttcctctcaaccttattttagtcagactcatccatccagttttctttttagggggaaaggggctcaaattagtgtctccacattcgcagctgcttctgcaggtagcttctcagatggacgtggtgtccagggagttgtgtaagggtcggggaggccccaggccctggagggaggggaaggagccggcaacacagaaaagctctgtggcactgaggggtggggagcccccttgttctgccctggacaggtgagggattaacagcactcccgtctaaagcacgcagcaggtgaacgctcagaacaccctcccacttcaggccttgtgcggagaacgcatcagggtccccgccggctcctgaagctcgtgcaaacctcggccgatgccgtcttactgggttttcagcactttgttctcacgcctgggtgctgtcttcaccatggtccatagcattcacagggtcacggtcaaagagactggtgggaagcgtgggggcctggtctgtgttatttagggaggggactagagagagcattgagggcctcgagaaagccaacatggagaaaccgcagctgagcagggcacagccctctgcagacaggggacagtgtggccctcagcgccctcagcctctgtggaagctgccatccgcagctggccccaggacgacgcacctcgcttggcccatcaggctggtcaggagacacaggtgtgagtctaaaaacgttccctgggccaccaaggcccgctgtcctgggacgttgggcaggtcccctccctctctggaggtttctcccccgaggacaggcccagaccccactctccaaccgtagtaaggctctggggccaccctcgctgcctgtagagtgcctggatagccgcgtggtgctccgcgccttcagggccataaagagcactttcatttccacgtctctttatcttatgaagagtgagatgaatgttggggaccccaagcgcggtgtgaggatcccggcaggccttgtggaaggcccagcacacggctctccggtggaaggcacccccttctgtgcccggtgggggccgtacatgggtgccgccagcacctgcgggtcagaacagggcgaggagctggggcaaggacagcaccatctgagccccgcttctgtcacctcctgtgcttgcagggagaagtggtgccacatgacccaggaggagcgcgacgacagcctccggttcaacgagaacatcaccttcgggcagctggggtaagggccagagtgggaaagcgggaggggagaggggggagggcccaccctgtgagctgtcacacctggtatcacaccctggggtgtgatgtcagcctgctctgaggcatggggttcatcacacttggcctccatgccagctcataattaatccgcctcctacacgacccctggtggccacagtgccacagtgagagttgctggtggctaattaggcagcagtgcgttttagtttctgctgacaattccaggcaggccatggtgggcgtcccagagacaagggcccagctccccggccctttcccctgggaggccagcgggtgacgctcttggggtttctcctgcagcacattcacgcacaacatgctggcctttggactgaacaagaagctgtgcaatgacttcctgaagaagcaggctgtgattggcaacctggatgaaggtgcgtctgggggaggctgctggcaggaggcgggcagggctggggtcaggagccagtgctgtgcccgctggcgcttctgcactgccagaaggcatgtcgtgttgcagtcggaaacgtggtgctgagctctcggcagacggcccctcctttctccccagtctgtatagacagacgcacaggacacctctcgttccatttggaatccatttctgctagatgggattgcgggcgttggggccatagcctgggtgttcacagtcagggcagaggaagaagggggacgcggcactgggactcagcttgcacggagccaaactctggccccaagttgcccccttctaaatggctgtcacgtggcatccttttctttctcagaccacactgccatcatgagtatcgggggacaagggtggtgaggagtgagttttgaggtttttctagaatctctggcttctgtgacagcagggagttgctgtgacattggcgccccccttgctgggggcccgtccctgtgtgcccccgccatctgccacaggcgttggttcttcttcatcgaaaaggacttacacttaggcgtgggtacggattgacccatattctttagagaatcccattctctacctaattcaagggatctgtggtggagtggcctcaggaggcatgagagtgccagtggctgctggacgacctcagaatgttgctcgcagccccacctcactagcaaagggcaagggggatgctgccacctctcccgctccccaggttggctggactgactgccccttgcctttcacaggctgtaggggctgagccccatgacaccattttcataagaaggtgcgtttcccagttttgagggctgcttccagccacctgcttgccccacaggcggcgtgctggccaagaggctgtgtgtgcaatgcgccctcatggcacagccctgccctgaagcacgcaagccgtgtggcctgcagaaggcagtgtggttcaggagctgcagccctgctcccagggaggcccgattcgtccctgtccgagtgacaagagcaggatatacctgtccctgtcactgtctttcatctgagaaataacatcactttctcttccagagcaatacaagctgcttagtgaccacattgagcaaatggccactgagtaggccccagaggtcgcactccgcaggaggactgaggccatgtgccattctcccgggcccagcgcccggccgtcaccccacccgatgacctgcatgaagccagcagcacccagagccactcctgctgccctagaactagcggttagaagaatccgctgttcctccctcatctcctctgcctgtgtctgcgacccccatccatgtgccaaagtgtcccttgggtcacacagctaaagccgaggtgaccagttgtaccccgagtgccaggcttgtgagatgagaccaagagggaggaggggaaggactccatgggccatcgtgggccaagggctggcgagggtgggggcgggcaagggatgcaggcaggacagccatgaggtggggctgcagccggcacacccagtggtggagggccggcgctgccactcacggtgggtggccgtgggccaccttccctgcaatgggtgcacacgcggctcccatccagccctctcagcgtggggctgtggctggtcctcactattccccagtctcccgctgtggggcaggaacaggaagtgacgggaaccttgaggaggaaacgcctgtgttagggagagagtgggtgcggtgtagaggatgctcttggccggctggagcaagacctggctcccaccagagggacgtgtgtgtgcctgcagacggcccgggagctgtgtgtctccgccagagtcacagcagtgccgaggtgtccgcggcagaccacacagaccgtctgaaatgcgcccgcctggcggacagctcccttctgaagcagagaagcctccatggtcacgaagcagcgttgtgctgtgtgtccctcgcaagaagcacaggaaagagaagtttctttagtagccactagacaaccaccctttctgaaagcaaacagtgctgctctttattccagacaaggcaggaaagtctgagttgggagtgacagtggctggagagaagcagatctgtgcaacgtgcagggcaagccagtggcgtggcctctgcctctaagcgctgagcattgggccccttccccaccagacctttgtagctcctccagcctctgcagagactcccttcacctcgcacttactgcctgggaaccacggcccttctcttctgtgggtctgtaccaggtactccaggccagcccatgggcccggggcctgaccccaacacctgcatgctgggtccagagccttctgtttcaccgtgcgtggacactgctaggccgcctggggtcccctgcctcctgcctgtcgctgccgtggtccctgactgcgaaataggcccgcggggctctccctcctcctgccatcctcccctcccgcccttcctggctacctcctctgacatgcggtcagataagtcccgtcttgtttgtgagtaccacagaaacgcctgagagtcacttacccggccactgcttggaaggtttccctccggggaatgcctccctggaatgttccagagacggaacattctctagagacaacagtctgtgctgcagattggttggatcacagaatgtgtgtctggggcattatctgaaacgtggtgtcatctgatgcatttggaccatatgctgccagactgcagaacgggggagccggggctcagggcccctgactgcatggtgcatgagtgatctcagcctagcgatgccgctggccagaccgtgaccatgctgccagtgtgctcgccatgagctgggtcagggctggggagttgtgcaggctggggtgacccttcccccatcattgggccccaacgggcatgtctccaccgaatccatttagagaaatgtcagagcgagggttgtgtggacacccctcgctctgatgccaactgcagataatacacacctcctgcagcgtccagccacggctccagggcactgctctcctccttgcaccggtgaaactcaggccacactcaagggctgactgtccaggcgctcccttcagccgcctcgtcgtcagcgttcttagtcatgcattattcgtgttagctgaaatgcattcagactttgttctgcggtgcccacaggacttacccctgtatgtacaggatttttgtatgaaagttttgtttgattctgagactctcttgggaacgctggagagcttgtgcacagcctctggaaggaaaggcagcgctgacttcgttgggcttttttccaagcactttaacttcagaaatggtcttgacacttttttctccacatagactcttgaaatagccatttcaggggaggaaagggttggggttttctttgtttgtttgtttgtttccccctttactacctgttcttgtagatctagctcctcagagttggaggaaggctgacagagaaggtctcctctgtgctccatccacacaggatgccggagagacagccccttgtgctgtgagcagagcaggcagtggctctggaggctgcctgtggtctccttccggctgtggctgacagtggctctggccagggttgcttggagaaggctcagtgtgcctgggacagggcttaccacctgccaccaaggtttcctctcttcccccaggacctgggcagagcaggcatgagctgggctgtggtgcagagcaagcagacccagccacactgctcaaaggtccctgcgtggggaggtgtcacaccaggggcacacccagggccacctgggtgtaggagagctctggtggcccctccgtaaactcaggaagtgtcaggtgatttcctagggagaggttcccagtcccagcaggcagaatgcccaaaaccaggagcacgaaggcctgtcatccatggggccattgcaggcactctgccgcccgaccttgagggctgtgccaatcctagtgaaccaaaatgcaaacaactcacacaagtgaaaagctccctgctttgaaaacaggacatgttgacaggcagcatggtatgtttttagcctttgttacagttttagcaacattgatgtctaagaggggccgtggtaatagattgcatctgccctgtgcatgcgcatgtttaaccacaggccagagaactcaattctgatgtcgtaagttctctgtaagtgaaatggggtagactgtatgattttcctattgccaaaagaaagaaagggggccaaacagctctgaaatttccaaaaaatggctagagggagagtccagtttctgagctctgtacccaaattaaaatcctgatgttcaggttaatccaagcaacacgcattgggtttaaaaccagcaccgaggcccagtgggggaatcacagacatcaccaagtctcgtcttctttccttcctgtgagttgaaaccaaacaggcctctcgctcactcctcccagcccagtaatgctgaggagttcagttgtgaggaaagaaggctggagctgtgagattcgcttttccctaggctgttccgcgtgggttaccttatcaccctggagcacttggtattccagacccctgacatgaggaatgcaggttcacactgtaaagagtttgtgaaaggtttcagtctaactggggttccttagctggaagccagggctggaagctacaggcctgaccttcctgggtcccactatctgttggcattttttttttttttttttttttagacggagttttgctcttgttgcccaggctggagtgcagtgacacaatctctactcactgcaacctccacctcccgggttcaagcaattctcctgcctcagcctcctgagtagctgggatgacaggtgcacgccaccacgcccggctaatttttatatttttggtagagatggggtttcaccatgctggccaggctggtctcgaactcctgacctcaggtgatcccccccacctcagcctcccaaagtgctgggattacaggcgtgaggcatcacacctgcctctgttggctttttagttaggaaggatccagctaggcccgtgtggttagatcagctttgttactgaattacctaaaaccagaccacagcacagccagggagcccagtagtgtttccaagaacagtgtggagcttgagaaagagaactttaaaaattagagggtccctttctgcagaggaagggatgctcgcagggtggcagtggcccagccccagcctcagggacggggagggagagccccctctgggcccagcaggcaggtgttctgaggctggtccctcctcagtttccgcagccacaaggcgaaacggccagattctcactcaaggtcgttctcactccttttcctgtcccgtttccagtcccactgagccattcacttctgctgaaccatttttcttaggatgcagccgtctcactcccttgtcctgtaaatcgtgtattcatgttgatgattcttggagataggtttcactttttcccagctgcgtccacaggaaaggggagtcggatgccagctgcaccccgcctggctcgcacaggctaagaccacagacagagcagggcttcccggagccacacaggccacgcaccccaggaacccttgctgccgcgggccaggaacaggaatgtgttggtgcctgagacaccaaatggaagaagcacatcaagactgttctcctgcggccaacactggcccggaagccgccctccatacaggccctcagggggcctgccttctgcgcctcagtcccccgtgcatccctgggcctgggtatcacatgctctccaggaaagggacggaatcaatcgtgtgaccgatgggctcgcaaggatgggtgccgccgtgggagccctgcctctggtgctggcaagggattgggtttgtgtgggtgtctctagcctgcagagtgcagtgagtgagagtccttgggagcgcggcgctgcctgtagctgtgcctggggatgcacgtggccacgggatttcagtgggacagcgctcccacaggggctgggggtgggggtggggtttcttagttactgttggaaagggaaaaattcaccatatccaaggggagagacgatgggctgggtttgtttactccaacttcccttctacacccctcctgcaggacagtacgatttggggagaacccagctccccactttatctgcagactctgggacctgacaaaacagtcagagcctgagtgcactgcagcctgaactcccttgagcagcgctataagggactttgcactttaaaaaggggatgcctgtcagtaaatcccctgtgcattgactagaactggggggctgcgcccgctccctccttaatcctagatgatttgctcatgaaatagaggtgggggacgaccgcatgcactctgggaggtgcagccctaaggggtggactccagatctccctgcaagagacagcttggcttggctttggctgttggggaggagtccctgccatcccggtgagcctggggctgttgcttagggtcttctgggtggacacgtggagaaagagaaggcaaacgttggaacactaggaaaagctagaaattcagacaacacacatggatccccttaaaacatgtaaatgtgtcagaacacggttgacctgccgccttcttgaacctggtggcccccgttggaactatcagtggcgtctcccatgcacacgccctctgctttctctttcctagactcgcggtgctcacatccagacattaccttgttggtagcccccaagtggcgtgcagtgacaccagtatcttctctgttgcatttttgcaatcttgtgtcccgctcggtgatgttctacaaactctgttttaaggttgagaaagtttcaagggtgaagatctcaaaacagtgctaaaatcaaaggtgtttgctgtgaagaaaaacatgtgtatatattgcaccttgagttgtcagaaggtagaaactgaaataaactaactttaaaaaaaaaagtctgtttaatttttaacacatccatgaggactttttacagaatttgcaatcttctcagtgatacccatagcttttcagaaggaaaccattttctctaaggccaaatagacatttttcccatgcgggctgagcacccgggtcttaacagatagagcagccacgttggccatgttggtagtctgtattcatgaatgagggaccccctttctggactgggtctcggcccaggttccaccagcgccttgagcccctccacctggacacctgaccctacccctcagagccaaagccaccttacctctttgattgggggttttggggtggtcagtggccctgaccacagcccctatccgacacgagcagggcgcctgcatcagttccttccaactccgttctacaaaagtatttcaaacatctggggggttttccttttctctgattgtaagaagtccacagccacattctgatactctggcctaaacagatgggcaatgagccctgggaaggagcaggacgcaggggcatcccccagaccccagggctgagatgcaggggtccccttcacgcccggggaaggagcaggacgcagaggcgtcccccagaccccagggctgagatgcaggggtccccttcacgcccggggaaggagcagggcacaggggtgtcccccagaccccagggctgagatgcaaggtccccctcccccagctgcctgagtggagtgccactccaggcagagaagaatggagcagcctccacgtccctggctctccatctgccccctcttagccacacagggaggggcgggcatggctggtgggtgcacagccctggggcgtcgcatctgggctttttctctggtgttgggggattcctcccgcaggaggtgaggggttagactcggaggcaaactccagggaggggagaaactcctctgaaaggcagcgaagaccccaaagagtttgggcagctcggggcaggacctggaagggcctggatccagttccacctcccgccagctgactgtatgcccttagccagatggttctttgagcctcagcttcttcatctgtggaccaggaagaagagcatcacacgccctaggccgttcctgtgggaaatgcaggcaggcctcttcctgcacagctgcccttcagacaggggcaggaagttccctatctagtgaaagaaaaaggacccagctcttctaatttttataggaataaattaaaatgtactattcggtcgggtgcggtggctcacacctgtaatcccagcactttgggaggccgaggtgggtggatcatttgaggtcgggagttggagaccagcctggccaacatggtgaaaccccgtctctactaataatacaaacattagctgggcatggtggtgggcacgtgtagtcccagctatttgggaggccgaggcaagagaatcgtttgaacccaggaggcggaggttgtaatgagccgagatcatgcctctgcactccagcctgagtgacagagcaagactccatctcaaaaaaaaaaaaaggcagggagggagggcatccctgtgggaggcggccacccccacctctgcctcctcagggccccaaaagagagaatttctgagttttcttgccagttcccaagtgaccagtggagaaggagtgacagggaaggctctgggccaattgtcccacctgtactccgggaccattggtctctttggtgcactggggccaaaggggaaggggagagacccccaacccagccgaccttacatgaaattggcaccaccaattccaggaccacagccctgacaagcaaggtcattgtccttcagaaactatcacagagctgggactcagctgaggtttctgaaaacacagacatttacatataagcaaatgtgtgtgtacacacaggtatatgcgtataaaagtatacaaatatacactctaaagcattcatagatggaatatacagattatatagaacatctagaaagttttagttacttctggagtgtgtatcctggcctgggggagtcaagttatttctggagtgtgtatcctggcctgggggagtcaaggattccccaagaggtgccgtggagccaaatcttgggtaatgaaaatcaccgtgggccgagcgcggtggctcccgcctgtaatcccagcactttgggaggccgaggtgggcagattgcctgagctcaggagtttaagaccagcctggccaacaaggcgaaaacccacctctactaaaaatacaaaacattagccaggcgtggcggcgggtgcctgtagtcccagctacaggtgaggttgaggcacgagagtcgcttgaacctgggaggcagaagtttcagtgagctgagatcgcaccactgggtgacagagtgagactctgtctcaaaaaaatcactgtgatgaagacgccaaccctacctcgatcctgtgagaaagatgtgtgtccctcactttgctaatgaaaaaaaccagggcactccacgtggggaatgcgaactcggggctgtctggctctagagctcagcggttatctacgagggcagcatgaggggccaccgggtggaccattcccagccaaggtcttcagaatgcaggaggctagccagggatgagccccccacagcgtggatgccccaccccaggccctcgaaaggattccacagctggaacaggcgcccccccaggatggaaggtttgtgatcctacctaggaagttggtagaaagaagcttctatgctgttccatctcctcatggaggatttagcctcatttggaactttcactggcttccgttgtctcaacagagacaagctgctttctggctttgagatgctgggacccccgaccgggggtggcccgttgggggtgctgggatcagtgaagccagcctgtatctgcaggctccaggtgcaccttccaacccgggaccattgggcagtgtgtggccttgagggacagagatggccacactcatgggaagcacggaagccagttttttttgtttgcttgtttgttttttgagacggagttttgcttttgttgcccaggctggagtgctgtggcacgatctcggctcactgcaacctctgccctgctggttcgagcgattttcctgcctcagcctcccgagtacctgggattacaggcgcaagccaccacgcctggctaattttttgtatatttggtagagataaggtttcaccatgttggccaagctggtctcaaactccagacctcaggtgatccacctgcctcggcctcccaaagcgctgggattacaggtgtgagcctccgtgcctggccacggaagccagttctaggacccagacatctccaccaagcctcaatgtcaccaagtcgtgccaggctgggaggagcaggctcatctcggctgccctcagagacggtccagaggattagctccccggctgtgcaccaggggccccagcagacagccccccagtccacacaccccaaccctctctacacttccatccccctctgacctctgtggacttctgtgacaatctttgtcccaagagcatccctgcacatcacgtccatgtgttacgggctgaattttgcccccaaaggtctatgttgaagtcctacctgcccccatacttcagaatgtgaccttatttggaaatggggtccttgctgatataattagtcaagatgaggccatcctggagtaaggtgggcctctgatgatgggcgtcctttataggagggggaggtttggacacaggctcaagtgcacactgggagaacaccacatgaagaggaaggccaggtccgggggatgtggctacaagcccaggcgtgccaaggacaggagccactggaagctggagggggcctgggatgggtgctccctctgagcctccaaaaagaaacagccctactgaccccttgctcgcagatttctgggttccagaacacaggagagtgattttctgtggtttgagctgcccaggcagtggtgctttgtcaaggcagcccaggaaaggaatctactgtgcttgcaacatgaacacaggggcaggcacgtcccacccaagcccccagactaaaggcagaatgagagagccgggatcaagctgagagtcacagggcatttattgaacacctactatatgccaggcacagcgatcccccagagcaacctgtgaagtgagtgatattggccctgttgtacagatgaggaaactgaggctcagaggacacgtggcttgcctgagggcacacagcagagcccacctgaggatccaaggccagctaagttcttctgactgttgtgggcagttctctcttatggggtccctgccccagtgccctgaggtcctccacgggggcctcctccatggagttgtcctcactctcctccccttcttttcctgggctccatatggtgctctgagcactctaaataataataataataaaacgacagcaacatcagtaatgataatggcagcaacaagtctcaagtgtttgttgcgcaacaggccgggttttctgtgcttcgtatagatctgttcatctgatactcagcacagccctacacggaggttactgttctaagccactctgcaggcgaggactctaaggcacagagaggctaggagactttcccaaggtcacaccgccgggagcagtgggctcggaccaagaaatagatagcataaagaaaaacaatcaaaacttcaggaaacattggatacactcacagaaatgcaaaatgctctggaaagtctcagcaacagaattgaacaagtagaagaaggaaattcagagcttgaagacaaggtctttgaattaacacaatccaacaaagacaaagaaaaaagaatcagaaaataagaacaaagcctccaggcagtctgggattattttaaacggcttgggattgcacttaccctacgtcgttagagagaatgtcctggaagcatgagatgcccaccctgcccacacacacagtgggctggctgccccttaaccacccactcacagagactaaacctgccatgattggcatgaggatgttcagggtcttcatttgccctactcagctggacctgcagagttccctgcagaaatataaatgcacctgatggcaggccttcctggggctgtaaggtaacatctaatgtatgtacctaatcacctccctaacctctgaggaaccctggattctggaacccgcgggcccacgggctgggatggaggtgtggacctgactgggggcctctgtttctcaagtggcaatacctcagagtgcctccagggagtgctcaggacccatggcagccacggcagggaccgtgtggcctaccacactgggtgacgtggcttcattgattctactttttttttttttttcctgagacagagtctcgctctgtaacccgggctggagtgcaatggtacgatctcggctcactgcaacctctgcctcctgggctcaagcgattctcctgcctcagcctcccaagtagctgggattacaggcatacaccaccacacccggctaatttttgctttttttttttttttttttttttagtagagatgggggtttcaacattttggccaggctggtctcgaactcctgacctcaagtgatcctcccacctcagcctcctaaagtgctgggattataggcatgagccaccgtgcccagcttcattctacttcaaggcaaagttctggtcagacccccgggcagccctccatgctcccaccacccctgcctcctcagcctcccatttcaaattcgagttctcagccaccctcctctaatccctggggttactaccacgggccttccaggccgtgcacgacattttaggtgtaacccctcacccacccacacgctcacctggctggcgagagactgaagaacagatggaggggggctggtgttggcaagcagccgagtgtcataatgcccataaactccttgcatcttggctctaaaatcctgccggggagagaccagggtgggtgggatccgatgggaaaacacagcgtgggttgggggagtgggatggaaagacggtggggacgagaaggcccgagacagctaatgctcatggaactccacggtcctctccaggagcttcctgtttcttatttcacataatctacagcagcccggtgagtgggcattatcaccccattttacagatgggagaggcccagagaggccaggtaacatgaccatcgtcacacaggataacagcaggattcgagatccccctttcccctaaaaagaatattgtgaagtgagtgaatgcgagagagcccctctgacctgcatcaaacctcatggtagttttaaggcttactggtaactcagatgatctgatgcttcccccatcaggagctggaatcaaactcctctccccttgaatacaggcagcctcagagattcacttctaacaaatggaatatggcaaagccacactgggttactgctgaagttaggtcataaaaggtgattgagtgccgggcgcggtggctcacacctgtaatcccagcactttgggaggccgaggcgggcagatcatgaggtcaggagatcaagaccatcctggctaacacggtgaaaccccgtctctactaaaaatacataacattagctgggcgtgatggagggcgcctgtagtcccagctactcgggaggcggaggcaggagaatggcttgaacctgggaggcggagttgcagtgagccgagatagtgccactgcactccagcctgggcgacacagcgagactccgtctcaaaaaaaaaaaaaaatggtgacactccctcttggaaccagctgctgtgaggaagcccaggccccatggaaaagccgtgggcagccactgtggccgtagaccccgaggaagacccagggatggcaggctttgtggggtgtagctcacacagttgcctggggctccacacccagaaggaccctgtgcttggcttagcactctgatgctgctgtcgtggagatcttagtaattgttgatacgccccacattttcattttgcagtgggccctgcaaatctcgtggcctgtcctgtgctcagatgacagccaccttctgctagacatgagggaggaaagctaagaaaagacagccccagcctctgaccaatggcagccacatgaagcctccacctgagaactgcccacgtgagccccatcaaccccagacccacagaaaagaatcatgataactgattgttgctttacaatactaggcttgcggaagggtgttacagataacgcaaacagctcattctagattttaaccagatcagaaggggataaaaagcacttctttctatttcaaaactacatcaagcatcagccaggaaatgctttttattgttgttgatccatttgtgtttttttgtttttgtttttttttttttgatggagtctcgctctgtcgcccaggctggagtgcagtggcacgatctcggctcactgcaacctccacctcccgggttcaagcgattctcctgcctcagcctcccgagtagctgggattgcaggtgcccaccaccacgcctggctaattttgtattttagtagagacagaatttcaccatgttggccaggctggcctcgaactcctgacctcaggtgatccgcctacctcggcctcccaaagtgctgggattacgggcgtgaaccaccatgcccccgccgatccatttgtttttaaacaccccagtgatgatgaatatgttgatgttccaaatagcattaagaaaaattatcctcactttggcacccacccaggggcagatattgacaacgcttcatcagcatgagtcttcaaagttagaaaagttgtgaaatgttaccaacaaaaacgacttctatcaagacaaaaccaaaatgaaactctgccccactccaccatataggaaacggggtgtctgtgactcaccagtagatccctctccaggtcatacttctccagggtctggaaggcgctagaatacacctccaccgctttggcatggaaaaccatctcaatagttacaaagtcacaaaaaaatttctgtggggagagaaacccaaagaatgtaagcatcgcagtgagaaagagcccagggaagcctgggatgcaggcagatggggtgggggtgtggagggctgtccgtgtggggacaggccccaggtggggagtttcgacatgttattttaaacttatttttctttcatagagaacacatttgcatggttcaaaaatcaaaactattggtcaggcacagtggcttatgcctgtaatctcagtactttaagaggccgagtcaggagaatcacttgagcccaggagttcaagaccagcctgggcaacatggtgaaatcctgtctctactaagtacataagtaaataaataaataaatataaagtatgccaaagtgtcaactgaggagacttgctctccatcctccatcctgttcccttctttcacttcccctctgcctcctgagatcacgttgagaagtttctgtgtattcccgccttgtttccttagataagccagtattctcttctcttctccctttttcactctggtctgagcttgcttttcccctgctaacaatcggtcctggagatctcttcacaggaggctttttttttttttgagatggagtctccctctgtcacccaagctggagtgaagtggtgtgatctcggctcactgcaatctccgcctcccgggttcaagcgattctcctgcctcagcctcctgagtagctgggattacagatgtgtgccaccacgcctggctaatttttgtattttttagtagggacagggtttcacaatgttggccaggatggtctcgaactcctgacctcaagtgatccgcaggagggctccactttcatgaatgggattagtgcccttgtaaaaaagactggagggagcttttctgccccttctgccacatgcggactcatagcaggcaccagccatggggaacaggccctcctcggatgctgaatctgctggagcctcggtcttggactccccagcctccaacaccgtgagaaataaacttctgttgtttataaatcacccagcttaaagtgttgtgttggcgcaggctggatggactaagacaggtggtgatgattagctcaagttcttgcttttatctcttttgaaatgtgaagggctttcaaggcatggtttggattcacatctcttacaaatttaatcccagaacttgaaagcactcccacttttaagctgtgcttctgttggcccctgacctggagaaccgtgtggtccatgctccctggtgctgcccacccagccccagacacatcaggtgctgaataacgtctgccgactgtttcagtttctccttgccatgtaggcagcgtgagcactaatcactgacgcttcattcccttgtgcattcattcatgcaggcgttcactcattcgttcattccacaagcatttactgaatacccactaggtgccaggccctggaccctggtggctgggattcggcaggggtcctgtcctgtggcactgacatgcagtgtgtcacacagtgacctcacaggcttctctgctccacgacgtgatgaatgtgatggatggcacacagcacaccacaaaccacatgatccgtccatctcctcccgccccaacggtgtcaactccgtgagctcagggaccttgtatgttgggcatggtgtacccagcatcaggcacagcacctggcacgcagtaggtgtgcattccacacttgttaaagtaacacgtgaattgaatacacaattaaccattccacctgggatggcagccccgtgggagcagagtagggtgtataaacaaggggcctgaccagtcttgggtccgggtgactttccccaaagaatgaggttgaagccgaaggagaaggaggcaccgactggacgcagatcaa

SEQ ID NO: 2184 - DNA, 7684 bp, Homo sapiens
caagagtgcctgaggctggatcagaaatagccacgatcgtccagtttgattgattgattgattgatttagttgtgatggagtctcgctgtatttcccaggctggagtgcagaggcacgatctccgttcactgcagcctccacctccccggttcaagtgattctcctgcctcagccttccgagtagctgggattacaggcacctgccaccacgcccggctgatttttgtgtttttagtagagacagggtttcgccatgttggccaggctggtcttgaactcctgacctcaggtgagccacccgcctcggcctcccaaagtgttgggattacaggcgtgagccactgcccccagccccagcttgatcttgaacctcctgtgtgtgggcagagagacatggccctgctactgcttgaacggcttccggagacagtgacttgtttcctttttccctctgaactatgccgtagggccaggtgagctgctgtgaaggactcattcttggtagccggcagttactggcaacttgtgagcttggtgggctcctactaacgcacctgggacaccaggctgctgggctcccctctaggcagcctcccctccaggcagcctcaccagcagctcccctgagccatggagaccccagaggtccccgtgggctcgctaatcgactttgggcctgaggcacccacctcttctcccctggaggcaccaccccctgtgctgcaggacggcgatggctccctgggggacggtgcatcagagagtgagaccactgagtctgcggacagtgagaatgacatgggcgagtcgccctcgcacccgtcctgggaccaagaccgccgttcctcctccaacgagtccttctcctccaaccagagcaccgagtctacccaggatgaagagaccctggcactcagggacttcatgcgtggctacgtggagaagatcttctctggaggggaggacttggatcaggaggagaaagccaagtttggagagtactgcagcagtgaaaatggaaaaggccgggagtggtttgctcgatacgtgagtgcccagcgctgcaactccaagtgtgtctcagaggcaaccttctaccgcctggtgcagtcttttgcagtggtgctgttcgagtgtcatcagatggatgactttgggcctgccaagaacctcatgaccatgtgcttcacctactaccacatcggaaaaccacagctgctgcccccggagtcccgggagaagcccgcgggcagcatcgactcctacctgaaatccgcaaacagctggctggccgaaaagaaggacatcgccgagcggctgctgaagaacacctcggccaggactgagaatgtcaagggcttcttcggggggctggagaccaagctgaaggggcccctggccaggaggaacgaggaagacgagaacaaaccccaggagaagcggcccagggctgtgaccgcgtacagccccgaggacgaaaagaagggggagaagatctacctgtacacgcacctgaagcaacagcccatctgaggggatgctggagaggaggaggagaagagggagaagtggtgccacatgacccaggaggagcgcgacgacagcctccggttcaacgagaacatcaccttcgggcagctgggcacattcacgcacaacatgctggcctttggactgaacaagaagctgtgcaatgacttcctgaagaagcaggctgtgattggcaacctggatgaagagcaatacaagctgcttagtgaccacattgagcaaatggccactgagtaggccccagaggtcgcactccgcaggaggactgaggccatgtgccattctcccgggcccagcgcccggccgtcaccccacccgatgacctgcatgaagccagcagcacccagagccactcctgctgccctagaactagcggttagaagaatccgctgttcctccctcatctcctctgcctgtgtctgcgacccccatccatgtgccaaagtgtcccttgggtcacacagctaaagccgaggtgaccagttgtaccccgagtgccaggcttgtgagatgagaccaagagggaggaggggaaggactccatgggccatcgtgggccaagggctggcgagggtgggggcgggcaagggatgcaggcaggacagccatgaggtggggctgcagccggcacacccagtggtggagggccggcgctgccactcacggtgggtggccgtgggccaccttccctgcaatgggtgcacacgcggctcccatccagccctctcagcgtggggctgtggctggtcctcactattccccagtctcccgctgtggggcaggaacaggaagtgacgggaaccttgaggaggaaacgcctgtgttagggagagagtgggtgcggtgtagaggatgctcttggccggctggagcaagacctggctcccaccagagggacgtgtgtgtgcctgcagacggcccgggagctgtgtgtctccgccagagtcacagcagtgccgaggtgtccgcggcagaccacacagaccgtctgaaatgcgcccgcctggcggacagctcccttctgaagcagagaagcctccatggtcacgaagcagcgttgtgctgtgtgtccctcgcaagaagcacaggaaagagaagtttctttagtagccactagacaaccaccctttctgaaagcaaacagtgctgctctttattccagacaaggcaggaaagtctgagttgggagtgacagtggctggagagaagcagatctgtgcaacgtgcagggcaagccagtggcgtggcctctgcctctaagcgctgagcattgggccccttccccaccagacctttgtagctcctccagcctctgcagagactcccttcacctcgcacttactgcctgggaaccacggcccttctcttctgtgggtctgtaccaggtactccaggccagcccatgggcccggggcctgaccccaacacctgcatgctgggtccagagccttctgtttcaccgtgcgtggacactgctaggccgcctggggtcccctgcctcctgcctgtcgctgccgtggtccctgactgcgaaataggcccgcggggctctccctcctcctgccatcctcccctcccgcccttcctggctacctcctctgacatgcggtcagataagtcccgtcttgtttgtgagtaccacagaaacgcctgagagtcacttacccggccactgcttggaaggtttccctccggggaatgcctccctggaatgttccagagacggaacattctctagagacaacagtctgtgctgcagattggttggatcacagaatgtgtgtctggggcattatctgaaacgtggtgtcatctgatgcatttggaccatatgctgccagactgcagaacgggggagccggggctcagggcccctgactgcatggtgcatgagtgatctcagcctagcgatgccgctggccagaccgtgaccatgctgccagtgtgctcgccatgagctgggtcagggctggggagttgtgcaggctggggtgacccttcccccatcattgggccccaacgggcatgtctccaccgaatccatttagagaaatgtcagagcgagggttgtgtggacacccctcgctctgatgccaactgcagataatacacacctcctgcagcgtccagccacggctccagggcactgctctcctccttgcaccggtgaaactcaggccacactcaagggctgactgtccaggcgctcccttcagccgcctcgtcgtcagcgttcttagtcatgcattattcgtgttagctgaaatgcattcagactttgttctgcggtgcccacaggacttacccctgtatgtacaggatttttgtatgaaagttttgtttgattctgagactctcttgggaacgctggagagcttgtgcacagcctctggaaggaaaggcagcgctgacttcgttgggcttttttccaagcactttaacttcagaaatggtcttgacacttttttctccacatagactcttgaaatagccatttcaggggaggaaagggttggggttttctttgtttgtttgtttgtttccccctttactacctgttcttgtagatctagctcctcagagttggaggaaggctgacagagaaggtctcctctgtgctccatccacacaggatgccggagagacagccccttgtgctgtgagcagagcaggcagtggctctggaggctgcctgtggtctccttccggctgtggctgacagtggctctggccagggttgcttggagaaggctcagtgtgcctgggacagggcttaccacctgccaccaaggtttcctctcttcccccaggacctgggcagagcaggcatgagctgggctgtggtgcagagcaagcagacccagccacactgctcaaaggtccctgcgtggggaggtgtcacaccaggggcacacccagggccacctgggtgtaggagagctctggtggcccctccgtaaactcaggaagtgtcaggtgatttcctagggagaggttcccagtcccagcaggcagaatgcccaaaaccaggagcacgaaggcctgtcatccatggggccattgcaggcactctgccgcccgaccttgagggctgtgccaatcctagtgaaccaaaatgcaaacaactcacacaagtgaaaagctccctgctttgaaaacaggacatgttgacaggcagcatggtatgtttttagcctttgttacagttttagcaacattgatgtctaagaggggccgtggtaatagattgcatctgccctgtgcatgcgcatgtttaaccacaggccagagaactcaattctgatgtcgtaagttctctgtaagtgaaatggggtagactgtatgattttcctattgccaaaagaaagaaagggggccaaacagctctgaaatttccaaaaaatggctagagggagagtccagtttctgagctctgtacccaaattaaaatcctgatgttcaggttaatccaagcaacacgcattgggtttaaaaccagcaccgaggcccagtgggggaatcacagacatcaccaagtctcgtcttctttccttcctgtgagttgaaaccaaacaggcctctcgctcactcctcccagcccagtaatgctgaggagttcagttgtgaggaaagaaggctggagctgtgagattcgcttttccctaggctgttccgcgtgggttaccttatcaccctggagcacttggtattccagacccctgacatgaggaatgcaggttcacactgtaaagagtttgtgaaaggtttcagtctaactggggttccttagctggaagccagggctggaagctacaggcctgaccttcctgggtcccactatctgttggcattttttttttttttttttttttagacggagttttgctcttgttgcccaggctggagtgcagtgacacaatctctactcactgcaacctccacctcccgggttcaagcaattctcctgcctcagcctcctgagtagctgggatgacaggtgcacgccaccacgcccggctaatttttatatttttggtagagatggggtttcaccatgctggccaggctggtctcgaactcctgacctcaggtgatcccccccacctcagcctcccaaagtgctgggattacaggcgtgaggcatcacacctgcctctgttggctttttagttaggaaggatccagctaggcccgtgtggttagatcagctttgttactgaattacctaaaaccagaccacagcacagccagggagcccagtagtgtttccaagaacagtgtggagcttgagaaagagaactttaaaaattagagggtccctttctgcagaggaagggatgctcgcagggtggcagtggcccagccccagcctcagggacggggagggagagccccctctgggcccagcaggcaggtgttctgaggctggtccctcctcagtttccgcagccacaaggcgaaacggccagattctcactcaaggtcgttctcactccttttcctgtcccgtttccagtcccactgagccattcacttctgctgaaccatttttcttaggatgcagccgtctcactcccttgtcctgtaaatcgtgtattcatgttgatgattcttggagataggtttcactttttcccagctgcgtccacaggaaaggggagtcggatgccagctgcaccccgcctggctcgcacaggctaagaccacagacagagcagggcttcccggagccacacaggccacgcaccccaggaacccttgctgccgcgggccaggaacaggaatgtgttggtgcctgagacaccaaatggaagaagcacatcaagactgttctcctgcggccaacactggcccggaagccgccctccatacaggccctcagggggcctgccttctgcgcctcagtcccccgtgcatccctgggcctgggtatcacatgctctccaggaaagggacggaatcaatcgtgtgaccgatgggctcgcaaggatgggtgccgccgtgggagccctgcctctggtgctggcaagggattgggtttgtgtgggtgtctctagcctgcagagtgcagtgagtgagagtccttgggagcgcggcgctgcctgtagctgtgcctggggatgcacgtggccacgggatttcagtgggacagcgctcccacaggggctgggggtgggggtggggtttcttagttactgttggaaagggaaaaattcaccatatccaaggggagagacgatgggctgggtttgtttactccaacttcccttctacacccctcctgcaggacagtacgatttggggagaacccagctccccactttatctgcagactctgggacctgacaaaacagtcagagcctgagtgcactgcagcctgaactcccttgagcagcgctataagggactttgcactttaaaaaggggatgcctgtcagtaaatcccctgtgcattgactagaactggggggctgcgcccgctccctccttaatcctagatgatttgctcatgaaatagaggtgggggacgaccgcatgcactctgggaggtgcagccctaaggggtggactccagatctccctgcaagagacagcttggcttggctttggctgttggggaggagtccctgccatcccggtgagcctggggctgttgcttagggtcttctgggtggacacgtggagaaagagaaggcaaacgttggaacactaggaaaagctagaaattcagacaacacacatggatccccttaaaacatgtaaatgtgtcagaacacggttgacctgccgccttcttgaacctggtggcccccgttggaactatcagtggcgtctcccatgcacacgccctctgctttctctttcctagactcgcggtgctcacatccagacattaccttgttggtagcccccaagtggcgtgcagtgacaccagtatcttctctgttgcatttttgcaatcttgtgtcccgctcggtgatgttctacaaactctgttttaaggttgagaaagtttcaagggtgaagatctcaaaacagtgctaaaatcaaaggtgtttgctgtgaagaaaaacatgtgtatatattgcaccttgagttgtcagaaggtagaaactgaaataaactaacttt

SEQ ID NO: 2185 - protein, 298 aa, Homo sapiens
MPEVPVGSLIDFGPEAPTSSPLEAPPPVLQDGDGSLGDGASESETTESADSENDMGESPSHPSWDQDRRSSSNESFSSNQSTESTQDEETLALRDFMRGYVEKIFSGGEDLDQEEKAKFGEYCSSENGKGREWFARYVSAQRCNSKCVSEATFYRLVQSFAVVLFECHQMDDFGPAKNLMTMCFTYYHIGKPQLLPPESREKPAGSIDSYLKSANSWLAEKKDIAERLLKNTSARTENVKGFFGGLETKLKGPLARRNEEDENKPQEKRPRAVTAYSPEDEKKGEKIYLYTHLKQQPI

SEQ ID NO: 2186 - DNA, 7762 bp, Homo sapiens
caagagtgcctgaggctggatcagaaatagccacgatcgtccagtttgattgattgattgattgatttagttgtgatggagtctcgctgtatttcccaggctggagtgcagaggcacgatctccgttcactgcagcctccacctccccggttcaagtgattctcctgcctcagccttccgagtagctgggattacaggcacctgccaccacgcccggctgatttttgtgtttttagtagagacagggtttcgccatgttggccaggctggtcttgaactcctgacctcaggtgagccacccgcctcggcctcccaaagtgttgggattacaggcgtgagccactgcccccagccccagcttgatcttgaacctcctgtgtgtgggcagagagacatggccctgctactgcttgaacggcttccggagacagtgacttgtttcctttttccctctgaactatgccgtagggccaggtgagctgctgtgaaggactcattcttggtagccggcagttactggcaacttgtgagcttggtgggctcctactaacgcacctgggacaccaggctgctgggctcccctctaggcagcctcccctccaggcagcctcaccagcagctcccctgagccatggagaccccagaggtccccgtgggctcgctaatcgactttgggcctgaggcacccacctcttctcccctggaggcaccaccccctgtgctgcaggacggcgatggctccctgggggacggtgcatcagagagtgagaccactgagtctgcggacagtgagaatgacatgggcgagtcgccctcgcacccgtcctgggaccaagaccgccgttcctcctccaacgagtccttctcctccaaccagagcaccgagtctacccaggatgaagagaccctggcactcagggacttcatgcgtggctacgtggagaagatcttctctggaggggaggacttggatcaggaggagaaagccaagtttggagagtactgcagcagtgaaaatggaaaaggccgggagtggtttgctcgatacgtgagtgcccagcgctgcaactccaagtgtgtctcagaggcaaccttctaccgcctggtgcagtcttttgcagtggtgctgttcgagtgtcatcagatggatgactttgggcctgccaagaacctcatgaccatgtgcttcacctactaccacatcggaaaaccacagctgctgcccccggagtcccgggagaagcccgcgggcagcatcgactcctacctgaaatccgcaaacagctggctggccgaaaagaaggacatcgccgagcggctgctgaagaacacctcggccaggactgagaatgtcaagggcttcttcggggggctggagaccaagctgaaggggcccctggccaggaggaacgaggaagacgagaacaaaccccaggagaagcggcccagggctgtgaccgcgtacagccccgaggacgaaaagaagggggagaagatctacctgtacacgcacctgaagcaacagcccatctggcacactctgaggttctggaatgcagccttttttgacgctgtccattgtgagaggacaaagcgatctcccactaccagaggggatgctggagaggaggaggagaagagggagaagtggtgccacatgacccaggaggagcgcgacgacagcctccggttcaacgagaacatcaccttcgggcagctgggcacattcacgcacaacatgctggcctttggactgaacaagaagctgtgcaatgacttcctgaagaagcaggctgtgattggcaacctggatgaagagcaatacaagctgcttagtgaccacattgagcaaatggccactgagtaggccccagaggtcgcactccgcaggaggactgaggccatgtgccattctcccgggcccagcgcccggccgtcaccccacccgatgacctgcatgaagccagcagcacccagagccactcctgctgccctagaactagcggttagaagaatccgctgttcctccctcatctcctctgcctgtgtctgcgacccccatccatgtgccaaagtgtcccttgggtcacacagctaaagccgaggtgaccagttgtaccccgagtgccaggcttgtgagatgagaccaagagggaggaggggaaggactccatgggccatcgtgggccaagggctggcgagggtgggggcgggcaagggatgcaggcaggacagccatgaggtggggctgcagccggcacacccagtggtggagggccggcgctgccactcacggtgggtggccgtgggccaccttccctgcaatgggtgcacacgcggctcccatccagccctctcagcgtggggctgtggctggtcctcactattccccagtctcccgctgtggggcaggaacaggaagtgacgggaaccttgaggaggaaacgcctgtgttagggagagagtgggtgcggtgtagaggatgctcttggccggctggagcaagacctggctcccaccagagggacgtgtgtgtgcctgcagacggcccgggagctgtgtgtctccgccagagtcacagcagtgccgaggtgtccgcggcagaccacacagaccgtctgaaatgcgcccgcctggcggacagctcccttctgaagcagagaagcctccatggtcacgaagcagcgttgtgctgtgtgtccctcgcaagaagcacaggaaagagaagtttctttagtagccactagacaaccaccctttctgaaagcaaacagtgctgctctttattccagacaaggcaggaaagtctgagttgggagtgacagtggctggagagaagcagatctgtgcaacgtgcagggcaagccagtggcgtggcctctgcctctaagcgctgagcattgggccccttccccaccagacctttgtagctcctccagcctctgcagagactcccttcacctcgcacttactgcctgggaaccacggcccttctcttctgtgggtctgtaccaggtactccaggccagcccatgggcccggggcctgaccccaacacctgcatgctgggtccagagccttctgtttcaccgtgcgtggacactgctaggccgcctggggtcccctgcctcctgcctgtcgctgccgtggtccctgactgcgaaataggcccgcggggctctccctcctcctgccatcctcccctcccgcccttcctggctacctcctctgacatgcggtcagataagtcccgtcttgtttgtgagtaccacagaaacgcctgagagtcacttacccggccactgcttggaaggtttccctccggggaatgcctccctggaatgttccagagacggaacattctctagagacaacagtctgtgctgcagattggttggatcacagaatgtgtgtctggggcattatctgaaacgtggtgtcatctgatgcatttggaccatatgctgccagactgcagaacgggggagccggggctcagggcccctgactgcatggtgcatgagtgatctcagcctagcgatgccgctggccagaccgtgaccatgctgccagtgtgctcgccatgagctgggtcagggctggggagttgtgcaggctggggtgacccttcccccatcattgggccccaacgggcatgtctccaccgaatccatttagagaaatgtcagagcgagggttgtgtggacacccctcgctctgatgccaactgcagataatacacacctcctgcagcgtccagccacggctccagggcactgctctcctccttgcaccggtgaaactcaggccacactcaagggctgactgtccaggcgctcccttcagccgcctcgtcgtcagcgttcttagtcatgcattattcgtgttagctgaaatgcattcagactttgttctgcggtgcccacaggacttacccctgtatgtacaggatttttgtatgaaagttttgtttgattctgagactctcttgggaacgctggagagcttgtgcacagcctctggaaggaaaggcagcgctgacttcgttgggcttttttccaagcactttaacttcagaaatggtcttgacacttttttctccacatagactcttgaaatagccatttcaggggaggaaagggttggggttttctttgtttgtttgtttgtttccccctttactacctgttcttgtagatctagctcctcagagttggaggaaggctgacagagaaggtctcctctgtgctccatccacacaggatgccggagagacagccccttgtgctgtgagcagagcaggcagtggctctggaggctgcctgtggtctccttccggctgtggctgacagtggctctggccagggttgcttggagaaggctcagtgtgcctgggacagggcttaccacctgccaccaaggtttcctctcttcccccaggacctgggcagagcaggcatgagctgggctgtggtgcagagcaagcagacccagccacactgctcaaaggtccctgcgtggggaggtgtcacaccaggggcacacccagggccacctgggtgtaggagagctctggtggcccctccgtaaactcaggaagtgtcaggtgatttcctagggagaggttcccagtcccagcaggcagaatgcccaaaaccaggagcacgaaggcctgtcatccatggggccattgcaggcactctgccgcccgaccttgagggctgtgccaatcctagtgaaccaaaatgcaaacaactcacacaagtgaaaagctccctgctttgaaaacaggacatgttgacaggcagcatggtatgtttttagcctttgttacagttttagcaacattgatgtctaagaggggccgtggtaatagattgcatctgccctgtgcatgcgcatgtttaaccacaggccagagaactcaattctgatgtcgtaagttctctgtaagtgaaatggggtagactgtatgattttcctattgccaaaagaaagaaagggggccaaacagctctgaaatttccaaaaaatggctagagggagagtccagtttctgagctctgtacccaaattaaaatcctgatgttcaggttaatccaagcaacacgcattgggtttaaaaccagcaccgaggcccagtgggggaatcacagacatcaccaagtctcgtcttctttccttcctgtgagttgaaaccaaacaggcctctcgctcactcctcccagcccagtaatgctgaggagttcagttgtgaggaaagaaggctggagctgtgagattcgcttttccctaggctgttccgcgtgggttaccttatcaccctggagcacttggtattccagacccctgacatgaggaatgcaggttcacactgtaaagagtttgtgaaaggtttcagtctaactggggttccttagctggaagccagggctggaagctacaggcctgaccttcctgggtcccactatctgttggcattttttttttttttttttttttagacggagttttgctcttgttgcccaggctggagtgcagtgacacaatctctactcactgcaacctccacctcccgggttcaagcaattctcctgcctcagcctcctgagtagctgggatgacaggtgcacgccaccacgcccggctaatttttatatttttggtagagatggggtttcaccatgctggccaggctggtctcgaactcctgacctcaggtgatcccccccacctcagcctcccaaagtgctgggattacaggcgtgaggcatcacacctgcctctgttggctttttagttaggaaggatccagctaggcccgtgtggttagatcagctttgttactgaattacctaaaaccagaccacagcacagccagggagcccagtagtgtttccaagaacagtgtggagcttgagaaagagaactttaaaaattagagggtccctttctgcagaggaagggatgctcgcagggtggcagtggcccagccccagcctcagggacggggagggagagccccctctgggcccagcaggcaggtgttctgaggctggtccctcctcagtttccgcagccacaaggcgaaacggccagattctcactcaaggtcgttctcactccttttcctgtcccgtttccagtcccactgagccattcacttctgctgaaccatttttcttaggatgcagccgtctcactcccttgtcctgtaaatcgtgtattcatgttgatgattcttggagataggtttcactttttcccagctgcgtccacaggaaaggggagtcggatgccagctgcaccccgcctggctcgcacaggctaagaccacagacagagcagggcttcccggagccacacaggccacgcaccccaggaacccttgctgccgcgggccaggaacaggaatgtgttggtgcctgagacaccaaatggaagaagcacatcaagactgttctcctgcggccaacactggcccggaagccgccctccatacaggccctcagggggcctgccttctgcgcctcagtcccccgtgcatccctgggcctgggtatcacatgctctccaggaaagggacggaatcaatcgtgtgaccgatgggctcgcaaggatgggtgccgccgtgggagccctgcctctggtgctggcaagggattgggtttgtgtgggtgtctctagcctgcagagtgcagtgagtgagagtccttgggagcgcggcgctgcctgtagctgtgcctggggatgcacgtggccacgggatttcagtgggacagcgctcccacaggggctgggggtgggggtggggtttcttagttactgttggaaagggaaaaattcaccatatccaaggggagagacgatgggctgggtttgtttactccaacttcccttctacacccctcctgcaggacagtacgatttggggagaacccagctccccactttatctgcagactctgggacctgacaaaacagtcagagcctgagtgcactgcagcctgaactcccttgagcagcgctataagggactttgcactttaaaaaggggatgcctgtcagtaaatcccctgtgcattgactagaactggggggctgcgcccgctccctccttaatcctagatgatttgctcatgaaatagaggtgggggacgaccgcatgcactctgggaggtgcagccctaaggggtggactccagatctccctgcaagagacagcttggcttggctttggctgttggggaggagtccctgccatcccggtgagcctggggctgttgcttagggtcttctgggtggacacgtggagaaagagaaggcaaacgttggaacactaggaaaagctagaaattcagacaacacacatggatccccttaaaacatgtaaatgtgtcagaacacggttgacctgccgccttcttgaacctggtggcccccgttggaactatcagtggcgtctcccatgcacacgccctctgctttctctttcctagactcgcggtgctcacatccagacattaccttgttggtagcccccaagtggcgtgcagtgacaccagtatcttctctgttgcatttttgcaatcttgtgtcccgctcggtgatgttctacaaactctgttttaaggttgagaaagtttcaagggtgaagatctcaaaacagtgctaaaatcaaaggtgtttgctgtgaagaaaaacatgtgtatatattgcaccttgagttgtcagaaggtagaaactgaaataaactaacttt

SEQ ID NO: 2187 - protein, 407 aa, Homo sapiens
MPEVPVGSLIDFGPEAPTSSPLEAPPPVLQDGDGSLGDGASESETTESADSENDMGESPSHPSWDQDRRSSSNESFSSNQSTESTQDEETLALRDFMRGYVEKIFSGGEDLDQEEKAKFGEYCSSENGKGREWFARYVSAQRCNSKCVSEATFYRLVQSFAVVLFECHQMDDFGPAKNLMTMCFTYYHIGKPQLLPPESREKPAGSIDSYLKSANSWLAEKKDIAERLLKNTSARTENVKGFFGGLETKLKGPLARRNEEDENKPQEKRPRAVTAYSPEDEKKGEKIYLYTHLKQQPIWHTLRFWNAAFFDAVHCERTKRSPTTRGDAGEEEEKREKWCHMTQEERDDSLRFNENITFGQLGTFTHNMLAFQKKLCNDFLKKQAVIGNLDEEQYKLLSDHIEQMATE

SEQ ID NO: 2188 - DNA, 7419 bp, Homo sapiens
ctgacagctcgcgccgcggcgccgggaaaggacccggctgctcgcgggcggcgcagtcgccgcagcagccgagtctgacggcgccggttcgctgcccggtccgcccgcggtgagagatgccgtagggccaggtgagctgctgtgaaggactcattcttggtagccggcagttactggcaacttgtgagcttggtgggctcctactaacgcacctgggacaccaggctgctgggctcccctctaggcagcctcccctccaggcagcctcaccagcagctcccctgagccatggagaccccagaggtccccgtgggctcgctaatcgactttgggcctgaggcacccacctcttctcccctggaggcaccaccccctgtgctgcaggacggcgatggctccctgggggacggtgcatcagagagtgagaccactgagtctgcggacagtgagaatgacatgggcgagtcgccctcgcacccgtcctgggaccaagaccgccgttcctcctccaacgagtccttctcctccaaccagagcaccgagtctacccaggatgaagagaccctggcactcagggacttcatgcgtggctacgtggagaagatcttctctggaggggaggacttggatcaggaggagaaagccaagtttggagagtactgcagcagtgaaaatggaaaaggccgggagtggtttgctcgatacgtgagtgcccagcgctgcaactccaagtgtgtctcagaggcaaccttctaccgcctggtgcagtcttttgcagtggtgctgttcgagtgtcatcagatggatgactttgggcctgccaagaacctcatgaccatgtgcttcacctactaccacatcggaaaaccacagctgctgcccccggagtcccgggagaagcccgcgggcagcatcgactcctacctgaaatccgcaaacagctggctggccgaaaagaaggacatcgccgagcggctgctgaagaacacctcggccaggactgagaatgtcaagggcttcttcggggggctggagaccaagctgaaggggcccctggccaggaggaacgaggaagacgagaacaaaccccaggagaagcggcccagggctgtgaccgcgtacagccccgaggacgaaaagaagggggagaagatctacctgtacacgcacctgaagcaacagcccatctggcacactctgaggttctggaatgcagccttttttgacgctgtccattgtgagaggacaaagcgatctcccactaccagaggggatgctggagaggaggaggagaagagggagaagtggtgccacatgacccaggaggagcgcgacgacagcctccggttcaacgagaacatcaccttcgggcagctgggcacattcacgcacaacatgctggcctttggactgaacaagaagctgtgcaatgacttcctgaagaagcaggctgtgattggcaacctggatgaagagcaatacaagctgcttagtgaccacattgagcaaatggccactgagtaggccccagaggtcgcactccgcaggaggactgaggccatgtgccattctcccgggcccagcgcccggccgtcaccccacccgatgacctgcatgaagccagcagcacccagagccactcctgctgccctagaactagcggttagaagaatccgctgttcctccctcatctcctctgcctgtgtctgcgacccccatccatgtgccaaagtgtcccttgggtcacacagctaaagccgaggtgaccagttgtaccccgagtgccaggcttgtgagatgagaccaagagggaggaggggaaggactccatgggccatcgtgggccaagggctggcgagggtgggggcgggcaagggatgcaggcaggacagccatgaggtggggctgcagccggcacacccagtggtggagggccggcgctgccactcacggtgggtggccgtgggccaccttccctgcaatgggtgcacacgcggctcccatccagccctctcagcgtggggctgtggctggtcctcactattccccagtctcccgctgtggggcaggaacaggaagtgacgggaaccttgaggaggaaacgcctgtgttagggagagagtgggtgcggtgtagaggatgctcttggccggctggagcaagacctggctcccaccagagggacgtgtgtgtgcctgcagacggcccgggagctgtgtgtctccgccagagtcacagcagtgccgaggtgtccgcggcagaccacacagaccgtctgaaatgcgcccgcctggcggacagctcccttctgaagcagagaagcctccatggtcacgaagcagcgttgtgctgtgtgtccctcgcaagaagcacaggaaagagaagtttctttagtagccactagacaaccaccctttctgaaagcaaacagtgctgctctttattccagacaaggcaggaaagtctgagttgggagtgacagtggctggagagaagcagatctgtgcaacgtgcagggcaagccagtggcgtggcctctgcctctaagcgctgagcattgggccccttccccaccagacctttgtagctcctccagcctctgcagagactcccttcacctcgcacttactgcctgggaaccacggcccttctcttctgtgggtctgtaccaggtactccaggccagcccatgggcccggggcctgaccccaacacctgcatgctgggtccagagccttctgtttcaccgtgcgtggacactgctaggccgcctggggtcccctgcctcctgcctgtcgctgccgtggtccctgactgcgaaataggcccgcggggctctccctcctcctgccatcctcccctcccgcccttcctggctacctcctctgacatgcggtcagataagtcccgtcttgtttgtgagtaccacagaaacgcctgagagtcacttacccggccactgcttggaaggtttccctccggggaatgcctccctggaatgttccagagacggaacattctctagagacaacagtctgtgctgcagattggttggatcacagaatgtgtgtctggggcattatctgaaacgtggtgtcatctgatgcatttggaccatatgctgccagactgcagaacgggggagccggggctcagggcccctgactgcatggtgcatgagtgatctcagcctagcgatgccgctggccagaccgtgaccatgctgccagtgtgctcgccatgagctgggtcagggctggggagttgtgcaggctggggtgacccttcccccatcattgggccccaacgggcatgtctccaccgaatccatttagagaaatgtcagagcgagggttgtgtggacacccctcgctctgatgccaactgcagataatacacacctcctgcagcgtccagccacggctccagggcactgctctcctccttgcaccggtgaaactcaggccacactcaagggctgactgtccaggcgctcccttcagccgcctcgtcgtcagcgttcttagtcatgcattattcgtgttagctgaaatgcattcagactttgttctgcggtgcccacaggacttacccctgtatgtacaggatttttgtatgaaagttttgtttgattctgagactctcttgggaacgctggagagcttgtgcacagcctctggaaggaaaggcagcgctgacttcgttgggcttttttccaagcactttaacttcagaaatggtcttgacacttttttctccacatagactcttgaaatagccatttcaggggaggaaagggttggggttttctttgtttgtttgtttgtttccccctttactacctgttcttgtagatctagctcctcagagttggaggaaggctgacagagaaggtctcctctgtgctccatccacacaggatgccggagagacagccccttgtgctgtgagcagagcaggcagtggctctggaggctgcctgtggtctccttccggctgtggctgacagtggctctggccagggttgcttggagaaggctcagtgtgcctgggacagggcttaccacctgccaccaaggtttcctctcttcccccaggacctgggcagagcaggcatgagctgggctgtggtgcagagcaagcagacccagccacactgctcaaaggtccctgcgtggggaggtgtcacaccaggggcacacccagggccacctgggtgtaggagagctctggtggcccctccgtaaactcaggaagtgtcaggtgatttcctagggagaggttcccagtcccagcaggcagaatgcccaaaaccaggagcacgaaggcctgtcatccatggggccattgcaggcactctgccgcccgaccttgagggctgtgccaatcctagtgaaccaaaatgcaaacaactcacacaagtgaaaagctccctgctttgaaaacaggacatgttgacaggcagcatggtatgtttttagcctttgttacagttttagcaacattgatgtctaagaggggccgtggtaatagattgcatctgccctgtgcatgcgcatgtttaaccacaggccagagaactcaattctgatgtcgtaagttctctgtaagtgaaatggggtagactgtatgattttcctattgccaaaagaaagaaagggggccaaacagctctgaaatttccaaaaaatggctagagggagagtccagtttctgagctctgtacccaaattaaaatcctgatgttcaggttaatccaagcaacacgcattgggtttaaaaccagcaccgaggcccagtgggggaatcacagacatcaccaagtctcgtcttctttccttcctgtgagttgaaaccaaacaggcctctcgctcactcctcccagcccagtaatgctgaggagttcagttgtgaggaaagaaggctggagctgtgagattcgcttttccctaggctgttccgcgtgggttaccttatcaccctggagcacttggtattccagacccctgacatgaggaatgcaggttcacactgtaaagagtttgtgaaaggtttcagtctaactggggttccttagctggaagccagggctggaagctacaggcctgaccttcctgggtcccactatctgttggcattttttttttttttttttttttagacggagttttgctcttgttgcccaggctggagtgcagtgacacaatctctactcactgcaacctccacctcccgggttcaagcaattctcctgcctcagcctcctgagtagctgggatgacaggtgcacgccaccacgcccggctaatttttatatttttggtagagatggggtttcaccatgctggccaggctggtctcgaactcctgacctcaggtgatcccccccacctcagcctcccaaagtgctgggattacaggcgtgaggcatcacacctgcctctgttggctttttagttaggaaggatccagctaggcccgtgtggttagatcagctttgttactgaattacctaaaaccagaccacagcacagccagggagcccagtagtgtttccaagaacagtgtggagcttgagaaagagaactttaaaaattagagggtccctttctgcagaggaagggatgctcgcagggtggcagtggcccagccccagcctcagggacggggagggagagccccctctgggcccagcaggcaggtgttctgaggctggtccctcctcagtttccgcagccacaaggcgaaacggccagattctcactcaaggtcgttctcactccttttcctgtcccgtttccagtcccactgagccattcacttctgctgaaccatttttcttaggatgcagccgtctcactcccttgtcctgtaaatcgtgtattcatgttgatgattcttggagataggtttcactttttcccagctgcgtccacaggaaaggggagtcggatgccagctgcaccccgcctggctcgcacaggctaagaccacagacagagcagggcttcccggagccacacaggccacgcaccccaggaacccttgctgccgcgggccaggaacaggaatgtgttggtgcctgagacaccaaatggaagaagcacatcaagactgttctcctgcggccaacactggcccggaagccgccctccatacaggccctcagggggcctgccttctgcgcctcagtcccccgtgcatccctgggcctgggtatcacatgctctccaggaaagggacggaatcaatcgtgtgaccgatgggctcgcaaggatgggtgccgccgtgggagccctgcctctggtgctggcaagggattgggtttgtgtgggtgtctctagcctgcagagtgcagtgagtgagagtccttgggagcgcggcgctgcctgtagctgtgcctggggatgcacgtggccacgggatttcagtgggacagcgctcccacaggggctgggggtgggggtggggtttcttagttactgttggaaagggaaaaattcaccatatccaaggggagagacgatgggctgggtttgtttactccaacttcccttctacacccctcctgcaggacagtacgatttggggagaacccagctccccactttatctgcagactctgggacctgacaaaacagtcagagcctgagtgcactgcagcctgaactcccttgagcagcgctataagggactttgcactttaaaaaggggatgcctgtcagtaaatcccctgtgcattgactagaactggggggctgcgcccgctccctccttaatcctagatgatttgctcatgaaatagaggtgggggacgaccgcatgcactctgggaggtgcagccctaaggggtggactccagatctccctgcaagagacagcttggcttggctttggctgttggggaggagtccctgccatcccggtgagcctggggctgttgcttagggtcttctgggtggacacgtggagaaagagaaggcaaacgttggaacactaggaaaagctagaaattcagacaacacacatggatccccttaaaacatgtaaatgtgtcagaacacggttgacctgccgccttcttgaacctggtggcccccgttggaactatcagtggcgtctcccatgcacacgccctctgctttctctttcctagactcgcggtgctcacatccagacattaccttgttggtagcccccaagtggcgtgcagtgacaccagtatcttctctgttgcatttttgcaatcttgtgtcccgctcggtgatgttctacaaactctgttttaaggttgagaaagtttcaagggtgaagatctcaaaacagtgctaaaatcaaaggtgtttgctgtgaagaaaaacatgtgtatatattgcaccttgagttgtcagaaggtagaaactgaaataaactaacttt

SEQ ID NO: 2189 - protein, 407 aa, Homo sapiens; identical to SEQ ID NO: 2187

SEQ ID NO: 2190 - DNA, 112903 bp, Mus musculus
  misc_feature (1)...(112903): n = A, C, G or T/U
ggccaaccctcttcttctgtctgcttcttaaatgtcagaatacgcagatggcgtgcatgcctgtgtttctgaagcatggactcgccaaactcgaaggccctctgatcatttggtccgagtgacctacagaaagaggcagaaggcccaagcaggccagagccacagttgtagggatggggcagaagggtgctggaacccgggttccttggcccagctgcttcttgctgtccagctgtgtctgacacctggcgacttactcctagtggggaagacagcacggaggcaattcggggatcgtttgcccaggtggatatgggcttagcactcaagaccagcagctgaagacattgtcttgtcagtccgcgtcacatgatccagtacctggcctggatcgggcttctgggagctcagagtactcagaagccggccacctcctgagatgttatcaccggaagctatccgttttagccaaatggaaaaatcagtagtgctggaggactgagcccccaacttggtacctccgggggccagaggagggcagatgctccccgagaccagagagtgactggaggtgggccaggccccaggcaactccagttccaccctgggactgtgttccccaaggtggctatgtcaggggacagacattttgactgtcacactgaggctatcgtttgatacccgaaagccatagggtacccagtggatggtgcaggggggctatctagacccaggatgtttccaggacacttgtgttcgttcaggcaccaggaaggccagttaaggatagacaggccctgtggccactggcaagggtcctggtgcgaccatagagtccaagatgtgagacagccagagagaggctggtttcagagataagccctgtggttggccagtccccgtgctgcttgatgggagttcagccctttagcctgtctttgggagccttcctcaaagcatggccttgtcaagcctgctcaagggtaggtctgggccagaggttagacccagctccccagggtgggaggatagggacaatatacacccttccaagattgaatggttttccctcctgtggcattgttttttggttggttgattgtttattgtatagtactgggggttgaatgtatggccttgtgcctgctaagcaaataccactgagctgtgtcctcaggccctctttttatttttcttctttcttactttttttgttttgttttgttttgtttttgtttgtttgtttgtttccagacagggtttctctgtgtaaccctggccgtcctggaactcactctgtagaccaggctggcctcgaactcagaaatccgcctgcctctgcctcccaagtcctgggattaaaggcatgggccaccactgcccggcttgacttttgttgttgatgttgttgttgtagttcttcttcttcttcttcttcttcttcttcttcttcttcttcttcttcttcttcttccacttcctcttcctcctcctccttctcttcctcctcctccatcctcttcatcgtcgtcgtcttcttcatcttcttctcctcctcctcctcttcctcttcttcttccttcctctttttgttttgaagacagagtttctctggccttggctgttccaaaattcagtctgtagactagattggcctcagagacccacctgctgcctcctgagtgctgggattaaaggtgtgtgccattatccaactatttttttgtttgtttgtttggttggttggttttgtttgttgtctcttttgttgttgttgctttaaagacaggctttaaaagggagctggggtgtggctcaattggtagagtgcttgcttagcgtgccatccatagtatttcataaaccaggtaaggtggcacccgtctgtcatcctagcctttgagagctcagggcacaaggaccacaagtcccaggtcgtagggaactggaggccaacctgagaggccctatcttgaaaaaaccaaaatagagtcaggcaactttccaagttcaagaccagctaggactacatactaaaaccctgtctaaatacaacaataacaagattgtatctaatgtggctgcagccatagagtcctgggcaggaggagctggggttcaaggctagcccaagatgtaaggtaagccctgcctcaagaagttttttttttgggaaaaaaactgattccaagagtaaggagaaagtcaaggcctgaacagagtccgacctgcagagtccagggatctgacccaacactgcataggtaaatcatacagtcagttacaatcaagcagggccggcaaagtggctcagcgggcagaggggcttgccgccagacctgacgacctgatttagagccccaggatctgcactgtgggaggaaggaaccaactctggcaagcggtcctctgacctcccgcacataccacggcaggcacgtctacacacaaacaaagactttataactcaagtctctgggagaggaagaggctccccctgaacctgtcactctatccggggtccaatctgtgggtttccttttctgggctgtgtgacttagggctatttgacttctctggcctccacctctcttgggaggaatgggaggaatgaggaaggacaggtttacttccctgggatgctgtgtacagcatccgtcttcttagagctgaagtatgtgacccagagccaggagaggagcaaaggagacggccgggctgtgccagacacactgttgggctcatcacaaaggtctcatgtcggggaacgcttgttaccggaccgtaagcatgtgtccgtgtgatggacagctgggaaggcgcggggcaaggtcctctactctggataccgtggacgagctgaatgggggtgctatcttcagtactggatctgggggggtcacgaacccccagaatgagcaagcaaggcttcacttgagcatctctcccaccaggccctgggacggcaagtgagactttacatgttgttcctttgcataaaactgagtcccaaaacgcaggtgaggtgggaggaaaggatgtgggtcaggtgacagactagccactgtgattctctttcttactgtcactgctgccctgggcctcgcggagacttcaggggccaaagcctttgctcacaggaggagcttctggaaggctgtctgtctctgaggcagatagccaagctgatggcctagggccatacctgttcccgaaacccagcagacacgtatgtcaccgtttaaaaccagaagagtggccatgacactggtaagccctgtgtcccgtggggttgttggtttctgggtgccaggctgctgtgggaccccaatactcattgcccagggcctgatataagccagctgacctgagctcctctagggacttgctggccaggagcaggccactgtgacagaggtgaccagagagatgagtcccctggagactggtaatgaatcaccacaaaccctgtgacctctgagaagccagagactttctgacagtccagtggctagaagtcaggtcaaagtgtcacaggccctgtcccttctggaggcagtgggaggcgcttcagcctctccagtgtctggggctgccactcagtcagaactgctgctggtcctggcctcacatggcttctctcttatatcactctattctctcctctttttggtattcaccgagtgtgtgtgtgtgtgtgtgtgtgtgtgtgtgtgtgtgtgtatgtgtgtgtgtgaatgtctgtgtgtgtgtatgtctgtggtgtgtgtggtgtatgtgctgtgtatgtgtgtctgtatgtctgtgacatgtgtggtatgtgtatgtgtgtatgtggtgtgtgtggtgtgtatgtagtgtgtgtgtatagtttgtgtgtggtttgtgtatgtgtatgtgctgtgtatatgtgtgttgtgtgtgtggtatatgtggtatgtatatgtgtgtctgtatgtctgtgtggtatgtgtatgtggtgtgtgtgtgtggtgtatgtggtttatgtgtgtgtatgtatgtatgtgtgcatgtgcttgtgcatgtatgtgtacgtggtatgtgtctggtgtgtgtgtatgtatatgtgtctgtctatgtgtgcatgtgcttgtgcatgtgtgtgtatgtggtgtgtgtgtgtgtgtgtgtgtgtgtgtgtatgtgtgtctggtatgtgtgtatgtgtgtctggtgtgtgtgtatatgtgtctgtctatgtatgtgtgcatgtgcttgtatgtatgtgtatttagtagaatctcaatatatagccctggaagatctagaactttctgtggttcagaccaggctggcctcacatgcagggtgcagggaccgtcctgcctctgcctccttggtgcaggagtgagagcagcccagccgagctccctcctttccaagccttgctgtccgcagccagactgatggtccttttatcttcagctttagctttagttttccaagtgataggcttacacatgtcccacctcacctggacccttccgtgggccacccagcactcaggaaggatcccacccacgcttcaccatacctgctcagcctcatcttcagaaccacgtcacaggcccaggtaccagaccacatctttggaagaccaccgttcaacccactgcacagggtaggatagcacagggcttggactctagaattcttgtgagatcccaaaatgggtaaaacacctggtcaggacacaaggagtagaaagatggaagccaatccaggcacagatgtcagggccagctgtgagctcaggcctttcgcttacaatctggggtttatctcaggggtttgtttgtcacctaagcaccagggccagagggagaagcgggtgtggctgctccctttgtgcccttgggcagtggacctcacagtactgggccttagcatgcagcgtacagagttacaagacgtgtctgtttggtgggagtaggtagggaagtcctccaaatgctaacaaagccactgaaaggcaggaggatggagccaaacacagtgaggtgcacctgtcactactgctgacatcgccagtgttatatggtcttgggagtaatcccagatgtttgtgggggccctgggctggttaggtgctggaagcacccatacccactctttcctggccctgtaggctctactcatttctggcatgaggcttctttgggtacacctcctcgagaaggcaagctggctgcctggcctaggggaccgcacatgcatgctggcatgcatgcatgcatgcacgatccatcccaatttccagatgaggagacagggtactcagggcttaggaatagacctccagggctcaaactccagatccggcatctgcttccccatgcctcacttggagaatggaagagcagggtgacagggatactccaaaggattctgtgggttgtttaagaatgctcagagcagcgcctggcccacactgggcatctgctgcccgactgccctgccagaggggacagacaggcatctggaggatccagcatgtcccaggagccatgcagacttggccctgcagcctccactcttttctggagtctgtggcatgagacttccttgtgtgcagctcctcaggaaggcaggctggctgcctggcctgggggaccgcacatgataggcgatgggtacagctgacagagaaccgcctgcctaagcatgtgtacggggctatttttattgtgttcagctggctggcgctggctgggctctgcctgagccctggcaagggtggccctgctgcagggagtgtgggggcctctctgtgttgaaggggcagccagtatggcaggcagcatcttcagagaggagacctgctggtgtcatgcatctctgcagggcagcctgaaacccctaccttcttttctatgggcgaatgggggttgtcaacccctctcctctctaaccttgggtggctttcactgtggtctgtctctctggaggtaagaggaaagatgccatgtggtgtcccggcctcccaaaagtcccagaggaaggatggttcctgggtggtccagtttcctaattgctgctgtttctccatcagagacagagacagaaacagagacagagggagaggagatactggctcatcatgctctgggggaggagagaggtaatgaccacctttttctggcgtaaaacataggagggcaacagcctaatacaaacacccacagccagcactggtgtgtccgcatggctgtggtgggagcgagtgctgggcacatgtcccaataggaaggaggccacagacatgcctggtagagggctggctccccatggggatatgaatggctgtagtgatggggtccacccaccacagcaaagccacaggggccagtgggaaagagaaagtgcagccagataccctgttcagccacattaggcaaacaactcaaccattcagagagagccagcacccgcgctggctgctgctggggggtgggggtgggggtgggcgggactttgtgttcttagatgttttggcaccaggtttatttgggggggggtctgtgggggaactaactcttgcccctgtagaatggagagagctccacccttcggaggtccctatcaccaggaaacattactaacctactctgagccttgactcaggggtgaaggaactgagctagatcagtaacatcatacagctagtctccttccccagggtgtggctcggtgcaattaggacttggcctgcacgggcttcgataattggatgcaggcattgggcttcttattaggagagagagaggttcttcttcgggaggctcaatgatagagggatgataagcagcgctgccccgccatcaggagatcctctctgcctgcccttcccactcgtggcctcttcacaagccaggcccaggcctcccctgcctcagtacgggtccccaatagtccccgagtggctggcacagaagcgaggtagtttggaatccagtctggacagccttctccacaggtggcttcaaggatgctcttttcaggatgacttctcctactttagcaggggaaggaaggaggggtgcccagcctattgggggagcatcctccctctgtaccctgcctgtgattggcccataattacaggtttattgcctgtatagctattgtgtaatgacatgtttgcaaattaatttttatggctcctgccattagcatatacagtggaggaaggtttcgtattaattactactgttgttcccgtaatcccggggaattaaaaaccaataaaagagtgacaacacaaactgatagtttagggtcttttaaaaatagtttttattcgtttccctgaagtacagctagagcttgtgaggggtcgggaagttgggcgggggctgggagtggggtatgtgtgtgagcggcgcctggtcccttctccttcacctagcccaagagtgcgggcaggtgatggatgctatgaccctagacccccgagtccggcctgtgtgtcctcgcctcgcaggcagccccggaaacaaagggcggcagcctagggcttgacgcgacctctggggtcatgcgtagcagagcggctagaggccagcagcggcgccttcctgctacttggggcccaggcgccctccacgggatcgcgctcgtctggtctgctgcagaggggggcgcagcaaggatcagaaggcttggcccccacctccctcaaagtgccctctagagctctcccctagaggcctgtaatctgagagtgacccgaattcaccgggtttattcggatctcagggccactggttgtggacccctgatgggtgaggttagagggccagggcagcaaccctagccaggcgcgacaatggctcctactgtgcgtacctgcggactaggacctgaggatctggggtcaaaaggtgaccattagtgtcacagagtcacacaaccccaggtagtcgcgccacggcggtagggagagcttccataaaaggccttgaaaaacaaatggtcgcatcttgatacttgctttgccgcgtgcgtttagtagtaggggctggtgtgtgggtaaatggacgctgtctctttaaaatcgctgggctggacaatgagcgcacaggatgtggtttggcggcagggttttttccccttcgatttggggaattatcacttggggccttcttgagctggtgtgaacgcgcggcggctggggaggggagatacaggcgccacactaacgctcagtgcagtcggtcgtttgcttaaaccaaattagccgggctctcgttactatggtgcagccggggcttgcagagtcccagtaatagcatttattaggtctgtttgcctggaagcatgccttcccggatctgataatgcccgggtgcaggagagtgtgggagatggtatcaagcatttgattacacttgcaacagggattttttaaggggtagggcgtggggggaggaaaggaaagagagaggccaaccgccggccttagctctcccgggcgcggtctccgcagcccgctgcgggctgcacaaagggcggccccggcctccccggggcacggtcgcgggggggaggtcgtgctccgggctcccgcagctgtcagacgtgggtggggaggagcgagggcgggccgacggccagagcgcggagttgggcagccagagggggccccggcggcgcccgcagtcgcccactgtttgcaaacggccggctcccgggccgaggggagcaccctgcagtcggaagtgggagcatccgcctggagccctgggcagcgggtctgatccgtaaggctctgaggccgcgcacgggcaggtcgcaagtggaactctcgtcaccgcggcgcgcagccgggagctccaggaggacgcggcgcagacggaaggagccgcccgccgctgcgccccttccctttcgctttcattaggggagacaaatctgctgtcaggcagccagctttccaatttaccgataatgattcttgcatgaaaattgatcgaggggctctccaccgccgcgcgctctcgcctcccgctctcctgctcctgccggctgcgcccccgcgagttcctcctcctcctcctctccctcctccccaccccctccgtctgagtcagtggtgggacgccgggcggggagataaccaaaaaggggggggtgctggtggtgagggggggaggggagcctgccctcaccagcgtccctagcccaagacttgtttgtcgccgctgcctctcccattgacgaggcgaaatctgccccctcggtacttcttggctgtttgggtattaattttctccaccccccagcacccctgccgagcgcccccctcctcctctccgcaccccgcccctcctcacccagtagctaaggggaaacgaaaacaaagccgatttctccttggcaaccagatgccccctcccgccgccccccttccttttcccttctggttctgaacgtgaaaccctgttggaaacaggtctcttgaccctcgcccttgacattcaaatggctgaatggaggcgagattgctgttcgcacgtcttagggggtgcttttttttctctcccttttcctctctctctcctgtctctttttctttccaatgagtaatccctaaagaccttaaccccccaatttcatcaccctcaccgcccccctttatttttctctctcctcttctgctctcccgccctcttccctccgccagctccccctcctttttttttttttttttttaatttgcatctcaagtccaaaaggcagaaaatacacacgcggcgaagacgccgggccgccgtggaggctccagcccttccttggtcaattacctcactgtggatctgctccggccgaggtggccgaacctgcccgggcgctggacggaaaggcagcctttgatcatctcggagaaggaaaaggaaaaaacacaaactggtttctacccacggtgctccggggatcgctcttctgcttttattttattgttttggacatttttgagcgccgtggcttggacgctggttttgtttcattgctgggcttgatttttttttttttttcccctcatttccttcttcgtccctctctggccactatggaattctaacatgagccatgttcggactgaagccgcctctctattacttaccaggtaagcgagtcgtgcgccaggtcctcgggtcccaagaccagggcgcgtaggggcgcacaggggcgcgctgctcggctgcccgctcagtgcgcgctgccgcgtggggcgcccggcccggtgcgcgtctcgctccttttgtctgcgcggagccggcggcgctgcgccccgggcgggatcgcgcgggtgtgaagttactttcccgcgggcggcgacctgggggccccggccccgccgccccctcccgattccctggaaggttttgttgtgcgaggccgggaggggccgtggccgcagtgcgcgcggcttcctgtttcctgcgcctcggtgcgcgctgacagccgctgccatgcaactttcagtttcgggggccaccgcgggagagatggggagccccgccacccttaagatgcttgcgcgcgggcgcgagggaagctagagagcccggagcgagcaggcaggcgtgggaacccggccctcctggtggcttccccctcgggtaccccctcgggtccgactgcacgtgaccgcaggtcgagagggctgagctgcgtgtggccgcttcttctaagaatgctgggtttttttaatcttcttttttttttctctaagccctggcacacagtttctattgaagttgaggcgtctgtggggtgcagaaatgttggggtgctgaaggagcagaggggcggccttcgtgcatgacatggtctgctcttttctgcagatgatttgggaatagttttgctaggaaacgtaggaaacgtgcacgtggctgggtgttgggttaacattgcctccccccgtccccacttgtgtgttgtgtggatcctgtggctcttgccagatctccaccaacctggagtccagagaaggagatgtgggccaagaacctgcctgggcaggactcagctacagggagctggccctagtcgtcctgacctagggcacacgttgtaactgagttaatgtagcagagatgaaaggtcgcaaggaaaagcgggtggaggaggcagttccgactgcaggacggctgtaggtggctctgggcgttcctttgcggatgcttctatgtccagccctacctggtggcaagcctgttctgttcctggggtgtccagtccttgctgttgtttatattgagacagggtctcacgatttagctctggctggcctggaacacgtagattcccctgcctcagcctcacctccaccaaagtgccggatgaaaggtgtgtgtgccacagggtctggccccaggctgtttttattggaagattttctccacgcacctccctctcttccagggcctgaaatagcaattgtcaaacctctagctgggctctccccttcctccgtgttcagttcatttcggtacttccttccatttggtctagctaaaattagagcccggaatccccagcttccagcagggttatctctgcaggagggcaggtgccctctgcagctctgccggctccccatgggaaggtgtgtgtggtagcctcttcacagaagtgtgcagactgattctgccagtgcttcctgttagccttgacaaggagagcaaagataggtactttctttttgtattcccaagcgcctctctggggccttggagctagctggtggtatgagaggaacctctgtagttaagtactgggcggctcacaagcacaggtgtttgaaatctgcaccccacgccacctgacatccaagggccggctggtatattagcttgtcaggtgacccattctttatttacacagggagcctcagaccgagaaggaggaagtgtcagactggggagttcaaagcaattaaaagaatcagccttggctgggattaggccctaggcaggcaggcgggtgtcagcaaggtgaatcctgcttgtcctgatccttcagggagggaaggacttggctctcctccccagggaggagggctcagataaattagccacaggttgaagggttttctcctactgaagtttattttttgacggtccctgccaaggttttccatcctgtgagtttagggtagaattggagctcaggtgcaccttgagctgtaggtaggtagtttggggactctcccatacaccccatggggtgggtactgatatctcaccctgctggccaatctgcccaagaggcccagtcgttgcccattctggaagtgtcagggctgggctctgctgtcagccacttcaagaggggatttccaggcctgagaacagtgggtgtctggttggctgtggtcagtagctttagttgagagtcaagtgtcttgacccttagagggacctggactctgagttgtaggtttgtcccaagactctggattctgtcctcaagatctggtcccatcaaggtggctgtaaccaaccaccaggggacagggtccagaatctatccaccagctactgtgggggagagggagggtggccacgttcaggttggccctattttcggtcttctcttgccacactggacaatgggtctgaagtccaacccagtgtgttcccagcctcaacctcggcaggtaaggaaagttcccagaagtccttcggttttcctgtctcttgacttggatccactgtgctgtcctcctaagattcaaagtctcctggtattaagtctctgttggcatgaggtgcacctgtgctcgcatggagtccctgaaggttctctgaccacataggttgagcagtgctcatgtagcccagactaaactgaccaggccgaccagatgctgctctactattggggggggggggggaatgaactgtgatttgttttgatttttgagagtctcatgtagtctggattagcctggaacttgctgtgtgacccaggttggcctcaaattccctatgcacctttctccaccccaccccaccccaccccaccggtaggtgttatggtatagagtcaatctccacacaggggtagccatcaagcttgggaaggttttaatcaggtgtggttacaaggatgaaatcttttgcagaaattcacagaacttaatggtctaggcgggnnnnnnnnnnnnnnnnnnnncttagtggtctaggcgggacttgaacttgggccagtctggctgactttatagtaagaagtgacttgctgactagagggtcaatcagctcctcgtgcaaagagaagaagatgcaggatctggggctgtgccccccccccatcttcctgacggtgacagatggtagtctttctctggggtcccctatctggctttcctctgtgtgcacagcttactggatacccctgtccctgaacgccacaggactttgtgatccctgcaggcggagactgactgtctcctttttgcttggcctgctgccagaccaataacgacagtcgtaaaaataaaaaggataataaaataaggaggaggaggctgtggccacttcacataaggcttgttccatgccagacttgctaattcgccggacgatgctgggaggtcaggcgagggctgtcccacttgactgcagaggaaactgaggcacaagggaggccgaggtcactggagtggcaaaaggcacagcaagagcctcagctgggccctaacccctgaccccggggcagtctggctccagagtctctgcttaataaatatttgttgaccggtcagggagagatggcggctggtattggcagtggtgccctcctggggccccttatcttgttcctgactgttggctgaccctgccctggccccaagatgaactcttgatgacctcacctccctctggattcccagtccgtagccaggaaggatgctctgagacctgccatgaagggactggggtctgagagcaccatggctagtggcggtacttagctttatatctgttgggacatcttctgtgcccaaacctgccccttgaggtcatagtgagtcattcagagatagaggaccaggctgacccgacgcctttatgcctttctgagcagcttaccctgtgctagcttagtctatgcatagagtcaggatagtggaaggataaaggtccccagagattgctctccagagtgttccaacctgtgtacaaggctaggtgtggactgtgcccagcatgggttgggggtgtgtgtgtacaagccagccagccagccagggcagcctcccttgccagtttacacctacacctgggacttgtgggatcctaaagaaaccctagagacctgctcttgggtcaggctgagcctgggaaggaggtttggccattttcgaagtgacaagagtccttacttacagctcagacacagtggtgggctacatggggctcacaactagcaccttcagggcggtcactaatttcagacacccctgagaactggggaaggactgctacgtttggatctgggaaagccaggggcccttttgtctcagtgaggtcagggcctggtctggctctcacctctgctcagtgagacggtcattaggattccaccctggcttccgtgcatctgcaatgccatgggtgggaatcgattgtcccttgttccaactccttatcttcgtgactcttcctgctctgggagcaaatggtctggaggacacttgcatctgcctggagggggaggagaatggaggctgtatttcctccctagagtaaggtgggcagtgggagggcctagccagacagactgtccctggcagagccagcctggggccagagggtctctgcctctgtagcatttactcccaagacctgtgttctctgtctgccttccccatggggtgaagtgccagggtccagtgagctctatttatatgtttacctcggcattttgcagccaaggacacctgccaggaaggctctcaggccagcgccttccactttcctggggactgactctgggggaggtcggtgctgccccagtcgactcgttaggaagggccgtgcagggtgtccttttttgccacactggggtttgaacccagagccttgaacttgccaggcaagtgctctaccaagtcacacgccacccacctcccagtccttctttcattctttagctttgagacaaaaaggcttgctaagtagctgtgggtgggcttgaacttactctgcacctcaggatggcctgagctttgtaatttacagtcagctgctccaggcctcgtagccgtgtgtgtgtgtgtgtgtgtgtgtgtgtgtgtgtgtgtgtgtgtatctagagatggttcacagggcctcaaacatgctagacaaacactacactccagaccctgaagtggctgacctttcttcagagaaatggatggtagaacttagctttttaggggcgatccccagaggacgggcgactaagtgcttgggaacttttcccttattggtggtctatgcactgaagtggactcgccaggggccaggccgcaggcgggaagaggggagtcgagtgtgagggaataatttagatatcgtggtctttcttcttttttttaagagccccatatagatttaaggtccttttgttaatttaggaacataaaaccgtgatgtgcagcttggtttgctcgtaaaattacaaagtgtggcatatttagatccccgaaggcatggggtaaaagggaaggaatgggtgagaattttttttaatatgtctttggggagattcatttttctggccttcccccctcaacagtgccaggccctctacagctccacagggccccatcgatgccttccgagttgggtgggactcagctggaaatgggggtgtttggcaagcagccaggcccagatcctgcccccagtccccaggcctgctgcccctggattcccttgtctcgttggatcatgctcgctctgccttcctcccgtcccccgcccgcagcgaggccggaagtgccctctgaccagtcctggcccactgcccagccagcctttggctaccggcttaatggtctgtacggtcaggaagtcaccggacccttggtcgtggaggaggacaggctgccgagccctcctcgtctatggggaccagtgttgcctggctctcctccctgacaggcagtgtgggctgggtccatgggctcctggcccgggtcagcctctgctgggccactctgagtggcccactgttgcttctcaccaggagcatgtgtgcctggcctagttccacgctctgtgaggtggaacatggattgaatatcagggtgacaagcgtctggggctttcctgttctgtagacaaggggaaggttcagtttgagtcagggagcagaggctgtgtctaggaggagacccccagtcccttccccttggtggtatttttatagcaaggctcccgagcctgtgaaccgtccaaaaaacaaaacaaaacaaaaaactcagcagggctcttgtagaagtcaagggttccaatgggggcagggttggggggggggtggagtttttttgtagcagcctgatgatatgcggcctgtgtctcattctgtggcttgggagcagctggggaaccggaccttgtccttatggcccaggctgggctctacagaaggaggcagggcaggtactgggccagacttttgaggctatgacatctgtgggagtggtaagggactttgaggccagtagggcgttgggactactcttgggaatgtcatcacacctctgatgtcagtgagctgggttctgtgagctgagggggacccagagttgtggggtttgtttttctttgtgtttgtggacgtgtgcatgctactgcacacacgtggaggtcagaggaccacttgtgggtgtcggctctcaccttccaccatgtgggattgaacccaggctgtcaggcttggcagcaggcaccttagccactgagccagtttgccagcctcacctaaaattttttgtttttgttgttgtttagtgtgtttgtttgtttgtttgttttttggtttttcgagacagggtttctctttatagccctggctgtcctggaactcacttagtagaccaggcttggcctcgaactcagaaatctgcctgcctctgcctcccgaatgctgggattaaaggcgtgtgccaccacgcccggcttgttgtttagtttttgtttacctatatttatttgcttttggtttctcgagacagggtttctctgtgcccctgattgtcctagaactcgctctgtagaccaggctggccttgaactcaagagatctgcctgcctctgcctctgcctctgcctcctgagggctaagattaaaggcgtgggccatcatttcctagttgacccgaaattttggagctgtcaactagcccaggtgcatggaagtacagaggagaaatcccagaggattgccttgtccagaggcacctgtagtttcgagagatctatgggggtgtagagagccaggattcggcactgggtggctagagcccccctcactcccccaaaaaagagaagatgttagcgtagtgggatcggaaggtcctgaggcaccagggatggtatggctgtcggggagtggggggaaataggtatgcagccggacagctggagagtagcgcatgcgtactggggccgataagtatggcgcaggacaggtgaagagcagcgcatgcgtactgaggccatccctaccgtagatcctctggctgctgggtgacccatgtagaggagaccaccatggctctgggtggctgctctgtggagcggagccatgccagttggagaccgtccgtggggctatgaggtccactcatggctgtcttgcctggtgaccttgtttctgcacctttgggaactggagggtggtagagtggtagtagggggttagagggtgtctgagggtctgcagcttgttcgaggtcagtccgctgcagcgctgcctaagcacagagcctagtgggagtcagggctgagtacctgctaccttcttggatgtgttactctgggcaggttacttaacctctctgtttccttgtgtgtttcccatgtgtactcggggccagccgtgccaccatgtaaggttgtttgtcctgagcattggtgagtgcacatgcaggaaccaaggatgaaatgctctggaatggaaggaagtctgcattctccttggagtatgtatgagttctcaactgtggcttcaggccggtgtcagagcagaggcccgccccaggttggtgctggaaggaaggcattacttatggactcctgcaggatgccaaggagcccaggctctcaaaatggtcaccagtgacaagtcctagatacgataatagttcactctggagacccatactggcctgtggcccacaccagcagatctcaagtcttctgggatagaaagtttttctggctggatcgtccccagggagaaggttatagggtactagattcttctaaaagcttttgcctcttgccccccctgaaggctccagcctcacccagcagcaatggagccccaggcagacggcacctcatctccgaccaggcctcctttgaactggcccccaacgccgcccacccccttgtcactctggcttgtaattcattcaggattagctcccaggcctctcgtgggcctaacttctgttgtcttggaaaccgtgtcaaccgtttgctggtttctgtgattatctgacaagagaagggggggtgcagcagggacatgaaagagcgtaaggggagacagcatgggtcttaatggagctctctgcggaggcctgggaggcacggaggggatgaggtgccctcaggcctacagctgtgtgccaggggctcccggtgggggctctcaccacttcctgccactctggggagctgagagaatcaccccctcacctcacctcacctttatttcctctatctcagatcctctgaggcccagagacaaggtgctattctcttctcccacctctctgctgggaaagttcccttgtgggcttctccagacacagcaacactgggaggctgggggaggcgggtaccaccacttgagaggaagctgagtgtgtagaccataagcccaccccaggatgctgggaactggacgccagatggggtcaggatggcaccagtgtgccattgtgggctggcctagggccttctgtgcctgacattgcagccacaactaaaagatgagaggggcacttgtcttgtgaagggccctcttctccccctcccccgtccccccattggctctggctacaggcgacgacagtctcagtggtcccagatgaagcaccctcttccatggggttctcagtgtggtctgggattcctcacagcctctgatgtcatggcaggggctgtggtggcttatgcagagaagaggccccatgaccccctgcctcccagggcctggcctcagatatcagggcctcttccacgccacactcagtccgttagcagagagggaggagccccaccaggctgggctcagctggaaggaatccatcccttgatagggtgggaaccacgctgaagagaagataggatggagatgtggaagctgccagttgggaggatagtcagcctgtctcttgcaagctcttcggaaagccaggtaggaggcctgacctctgggactgggactagactctgtcctctagggagcctgcctttggggtttccagacagtctaggttgtgggcctagagcagtcttggatctcagtgtggaagctggaaagtcctgccttgagggtttacagtgggcctgtgtagctgccccttgaaggtggtgtgagggtctgcacacaagagcccagctctggtcacaggaagagcagcccctccctggagtgaggggccggttagatgcctttggggggagccgctaatgagccacatctgattttttatgaacctccctggtaaattattaatttgggccagaaatgaaagtgtggaatcggataagctcatgaatattcatggccgaatcgagcacgggttgatcagtggctggagcggccagccaggctcctgacccagatacagggcagagctctgggagcctcccctccccctgctcgggttgtaggtggggctggtgactcacaactcacacacagtagtgtctcacgctggaatgacaggagcagaagtctgaggcccctgccgctagtcagagccatgcctccccatttctagatgagggtcccctcagaggaagacctttgggtctgggaaactgatgttagggccactgggccctcctacctaagtgtattctgctaggctactgtagtagccagttggcatctcaggctgctccaaccagaccgcttcctcttaccttgcctggcaactctgcccaaaggccaggtctagggagggctgcttggctctgacctgctacctggttacacctctgtgcagactgttttcctcaccaggcctcaaggctcagccctgttagatgctgcttctccccaggcccaggtctgtgaaagtgggactcttggaggactccatgaattcagaaaccagatctggttttttgttgttgttcttttgtggtttttgttttgttgttgttgttgttgttgttgttgtttgttatttttgtttgtctggtttggttttttttcaagacagggtttctctgtgtagccctggctgtcctggaactcactctgtagaccaggctggcctcaaactcagaaatccacctgcctctgcctcgcaagtgctgggattaaaggcgtgcgccaccacacccagcagaaaccagatctattttgtcgaattctttttgacacttattttgtgctgggggtgggatggggtgggtttccagccaccaggcacctgtgaaggtcaaaggacaacttgcaggagtgtgtcctcacctttcacagtatgggtctctggggtctctgggtccctgcattgaaacttggaccgtcaggctcgacatgaacctttctctgcggaaccatctgctcccctggcccaagagttcggcttttgtttttgtatttgtttattagacagggtgttatttttgcaacctaggctgccctcaaattttccatcctcctgcctcagcctcctgactactgagatcacaggcctgcatccccaactcctgggtagcagactaggatctggatctgcagatcccctgttggaagggcttgggcaagttgtttgctaaacttcttgtttgctaaactgctgtctcctacttaggatgtggaaagctggtttgtttgtttaaagccctgaaggagacctcgtgtagtggcacaggactgtgatctcaggatgtgggaagctgaggcaggaattatttctgtgatggctgtccggctgagctggggagtactcacagcctcacaggctggcgcctgttatccagcctgttgtggccccgggcacctcagggccaccttagactgtgtggctttctattcctctcggtacaggctttgcccctccctaggcctgggcaggctccctgtgggtagaaccaaggagtttccccctaaacctcaggtggggagggagcctgcagaagagagggaggtgtctggtggtccactgtgagctgtggcctggagttcacaggccaagctggcctctgacctagaaaacctgtccggagaggcagctcccaggccagatggggttaaaggtcagttctggggcctcttcagggccagggagctctgaaggtcttggtcattggtcagtgtgactggcaaggactgtggccttgggaatatcctccgggcccagagtatggggagaactgcctccagaacctcacctttggccttcccttggccttgccgatgactgtggccggcatccacctgccctgcagggtcaagggcaacagaagggattttattggaagcacagaaaccagcaagtccactcgttggctttttatccagagtcagaagcctttgactcaaggctctgtcacctccaggatgccagggtgcagagggggcagccagccagcaggttggaccggtgcggtgagccgagtgggcaggatgctaagcaaacagccaccaggcagcagtgtccctggcctggctggaaagagacatttgtgcttggcagctgccagccagttctcgacacctggctgtgccaggcccaggcagggggaaggagtgaaagttagtcataggtcttgcctcctaggctgcaagttccctgggctggatcctgggatgttcctgactccagcctagagcaaaccgggaggccttcctgcaggaggtggtaccccatgcagctaatgagtgtggactgggtgtttaaaggggtcacatggggacagagagtggtttgcctctcaggtgtcacagctgggctgggtgcttagaaggaccctgtatcttgctaaaaaaaaggctccagggagctgtgccttatgtagtaaggacttactcctgagcccccaccggtaggcacccttcccaggcctcgccctaggagcagagctagatctgcgttgttacctgagacccagcacctggcttcatgtccgaagctttggaagcttgtcatgtgccacatgtgcatgtcatgtgcttgtcatgtgcttcttgtttctgagttggatggtggctgccaagctggccagcgcagttagagatcaagaccccagtcactaggaagtatacagaaggcagtgctggtctcagccctggggcaggtgcagacactggagctaagggttcctagagctattggaaccttaaggagactctgctgagcctgagcgcctgggtgtgtgtgtgtgtgtgtgtgtgtgtgtgtgtgtgtgtgtgtgtaagggttcctagagctattgggaccttaaggagactgtgctgagcctgagcgcctggtgtgtgtgtgtgtgtgtatgtgtgtgtgtgtgtgtgtgtgtgtgtgtgtgtgtgtgtgtgtgtataagggttcctagagctattgggaccttaaggagactctgctgagcctgagcgcctggtgtgtgtgtgtgtgtgtgtgtgtgtgtgtgtgtgtgttcctagagctattgggaccttaaggagactctgctgaacctgagcgcctggtgtgcgtgtgcgtgtgcgtgtgtgtgtgtgtgtgtgtgtaagtaagggttcctagagctattgggaccttaaggagactctgctgagcctgagcacctggtgggtgtgtgtgtgtgtgtgtgtgtgtgtgtgtgtgtgtgtgtgtaagtaagggttcctagagctattgggaccttaaggagactctgctgagcctgaggctggtgtgtatgtgtgtgtgtgtgtgtgtgtgtgtgtgtgtgtgtacacataccaggaacctgacagtaaacactggagggatttgcagggacagatcagaggttacagagcctggcaggtcctccctgcaggggcaggtcactgtcagtggaacatgttgagagcctggggacaccgtggaggtacccgtccacaaaatgaggaaataaggttgggtgtgggcaggaacccccaagggagatagtttctttaaggaaggggtaggcccactgttgtgagtgggtcggctttgcctcttccaggtggcccctccccctcctctccagagtaggtttgaggcaacagagctggaaagagacccccagcaggggttccccagtgcagtagcccctccgcaatgccataggataggtgctaataaggtcccaaagggggacccacgggtcagtggaacattctgggtgggaaaaaaaatacaggatgaagacctaaggcatcccaggagaggagggtgggataacagcctagaagtggggaggtgggggtaggggtgttacctgtgtgggctgggggtgtggggaagatgtttatacttatgggggacttggattgtagatggcgactggaggggtggcttctgtggattcattcatctaaccttagcctcacactgaagaagaaagtgtgcagagactgagctgtccgggacaggttgtacaaccagtcagtcagtggtagggcagggtttaaattgtgctggtcagattgcagatgccttttctagcctctcagctttcttacccccactactgcagggtcctgaccccaaatgcatgggctctccgaatcccttttttcacgcatggcccagagctccatctccgtggtgggacacaagtccaccgagatactgactcctctcttggctcccatgagcccacgtatggcaggcaggccttgtgtggacagggttcatttcttcgagttgtgggccttagaggctggttctcagggtcattaaaagatgccatgttctgtctgagcctcgttgtccccgtagcacagtggagcctcataccagctgggcgtgatgatggcttaactcaggcactcagagataggtgaatctctgagttcaaggccagcatggtctacagagtgagttccagaacagccaagggtacacagagaaaccctgtctggaaaaacaatacaaactttgtgaattctggggtgttcgatggctgtgttcagcacaggcccaagaccagagcaggtggcccagaggtagcagcttctgtcccccaggagacaaggtttcactgtgtagccctggctgtcctggaccttgtatgtagatcaggctggcctcaaactcacagagatccagctgcctctgctcctgagtaccaggaataaagacacctggcaggttgtgcacttttttttttttttaagattttattttattattatatctaagtacacactgttacactgtagctgtcttcagacacaccagaagagggcatcagatcacattacagatggttgtgggccaccatatggtttctggggattgaactcatgacctttggaagagcagtcagtgctcttaatcactgagccatctctccagccccaggttgtgcacttcttgtccgtaagggtctgtgtgtttctgggatggaaatttgggagaaattattcctgtcagaattccacccatagaaaagagaccacagtagggacagtgggtgttagagccactgtgttctcatctcacagtagggcaggcccagcaccaagcagaaacaggacctccatggtctcagcctcccttgagcatagtctggaagagaccatcccaccttggtagcacgggaaggccctgcctccctctgcccgctgtgacaggcaggccccaagctgagttgttcttggaggatgtccagctggtcagagagctggcctggctgcactcctttgagagaggaagctatcaagggccggccatgggagttgtaaggataaatggctctccctagcaggcagccagaacgcctctctcctggctaaggaagaaccaggcctgtgaagggcccagtgcccactattcagctatagcccagagatggaaaaccacttgcccggggggtcacacagcacttggaggccggagtacaaccaggaatgctcctggcagcagctgtgcatgttagcagctcagacatccttactgcccctgtcacaaccctgctgtgcttatcctggaagccacagccacccaacccatgagctgtctcttgtctctcctcgactggacaaggcccaggggtcaagtcgcaggcgtggctgtggcctagagaggaggcccaagttacacacccctctccggactactgcgctgatgctaaagggtgcctttgaacagtgcatacccaggcagctgccctcttatggcttggcttggattgnnnnnnnnnnnnnnnnnnnnccaccccacctcagaccccttggtgagccccgccccccaacaccaccgtagagctcccaggggtggctcagctgccgccagggtgagcgggagcgtcctgagttgtggtcccccacccccgcagttccttgtgtctgctcttgctctgcccaccccagtgctcctgcgggtgcagtaagcttggcctgagcccccagcaggccgcggtccccttaccctgccagccagttgctggtcttaaaggttaatccccactctgtagctggatcccagcccctcccgccgcagccctttccgccccagttaattaaatccgctcggctattgtcagaagagaaactcgggtgtttattgcgcctccagaatgtcaaaggctcgcacggtttgaagacatgctggcagggaatagcccgagcatatgtctacgaggccgggggcagccaggccactgccacctccgcgacctgcggctgctgctgctccggctgccgctaactgcctcccagacaggcacttgacagggcctcatgtaccaggagagccctggctgagcccccggggagatcagctcagctcataaatatcctggtccctgagactgcttcaccaagaggaatttaaaacgcagaggaaggaaataaacacagaccctcctcctgcaccacagggtggggagccccttagaagaccctgagggggcggcttccccatctctctctttctcccctcccccgtatccttgtgtgtgttcacgttttattattattgggcagaagcacatggctaattgtgattttccccccctcgtggagtggggcgtgagatggatgcgttcattttatagggatttttttgttgttctcccccctaataataacgctttaaagatgtttgacatgtgtaactaacagctggtttcccgttgtggaaactggccttttatttcgaagcaggttgaactgtcattagtggtataattaggtgactgtcagcgtagagcagaaagctgcttaattgtagagacggcgttgcgagggctcccgtcttttcatggctatatttgttttagctgtttgaattttcattgtattttggcatttggtatgttgcctccgttttgttggggttttcttctcttcctgtttttagtgcgtctgacagctgtgttcatgagcgcctggtcctgaggacagccggatccacgcaggcggcagtaccagagccaggacgctggtcctgtactcccgggcccaggttggagccaggaacaaggccaagtgaaggccggccactggcacagacctgacctccccaaaaggccacctgaggattttatccctcggcacagggtgttggaaggcagcattacagtgtgagttgctaatatgtagtgaggctgggggttgctgggtggccccccagctcctgctgtgcccgccattgtgcagggtctttgatggaaccagagtttgaaaacaacctggctctatgaaatctacagtgctgtctttacaacgtaaaagctgggtttacctctgtcaccttttgcctggccctgagccgagctagctacaggtgcagtttgctccccagtgctaccttgggactccttctcagatctgggtgctgtgtgggtctagggaactgtattgggtcttggatgttaaacatgtactgagaggtactttgtggggtactatgcagagtctggggtgctgtgcagagtctggggttctgtgtagggtctggggttctgtgcagggtctggggtgctgtgcagggtctggggtgctgtgcagggtctggggtgctgtgcagggtgtgtctgctctgtgttaggaaggatgtaggaagtatctgtctgacccctgctggacggttgcacactttccctgggagccaaggtgccttgcggtgggtggcatctgtcactgagaggcatgccacaggaatcacagctgccctaatgttcctcaggcctttccctgaccacaggaggtcccaggtgaaggacctcaatgtcaccctgcctggggtatcacagacaggaagtaaggttctgcaggccaggtgacccacctccaacacccctgcactgagttccttctgtggtggggaaacttggggtccaagtcgtgaagatatttgtggtgaggaggaataggggtgagaggggggacaaatgtagactgaatccttgtggagaagtagggtgtagattggggcttatgatgacaaaagttacagggcggcaggggaggggggattcaggtcagccagagcagaacacaggcctgacagggagaatctcttgtccccaaacccagttagccgcagagacatctgacaccccataatcctttgtgctacacctaacaaagctggggatttattttatttcatttattttatggtttttcgagacagggtttctctgcatagccctggctgtcctggaactcactttgtagacgaggctggcctcgaactcagaaaaccgcctgcctctgcctcctgagtgctgggattaaaggtgtgcgtcaccacacccggcaaagagttgggaatttttgagtacctgctgtatacccccatggaggctgagtcgccctccgcccacccatgtgtccattacacaggggagggagggagccccagagagagacccaggcactggcaggacctaagcataggacagaggctaagggtcactgtttcccaggaatagttctgcacagatggtcaacctctgcctgacttgagaactagatttcttcctacccgtagccagaggattcagggagaagccaaggttgatgaaggccagaactcaggttattgacgcctctggctccttgcatctccagtggggctctccaggctggtctacaacacgtcagctgttgctagtggattactacctgggctgacctccaccctgcctgtgaacaggatggtttggtgttgtgcagtccgggggtgctgcacagagtctgggggtgctgtgctagatctaggggtagtgggtggggcctggattctgtgcggggtctggatgctgtgcctaggtctgggctgctatgttgggtctgcaggtgctgtgctgggtctgaggatgctgtgcggcatctgggccccaggatgctacagctgtgtgtccacctctctcgcgcttttcctcagctcagtagcctggcagtggaggctgaggcctttgttctctagaatcagaggcagtgatgggcctatggttcttggtaaggctgccttctcccagcctgtccctggtcaacaggctgctggggtcggtggaggcgtctctaccatggaatcctagtctcacctgggaagtggccccagggtcgctgctggctaggcctctccggagttttatggcaaacagatagatgacagatggacagctttgttgctttagtgcaggatggaaagttagaccgtctccccagtgataggcttctctggaacccatatggaccggtttttctctggccacacccttcgctccagtgcgacaggtgcgtgcgtgcatggtcactgttaccagctttcatctgcaaagagcagagtccaagaagggctgactgccttgtgcatggcaatcatagaggtgggattcagacctgggcctgcccctccctaagcctcaggcctcttggtccactaggtgaaatgaattcccaactccgtctctctctaagacggagctgggaattctctggggactctctcctgctccgctgtgctagccatgatgtgactgtgtggtccccgcagcccctgtacacacagcttcttgctcattcagacctccccacatccagagccccacacccaacactctcacccttgtccttgtcaccctgacccatcatgttcctgtccatgttttcttgcaacaccttggagctcctgagaccaggagtggggtgtctcccagcggagcaataaactctctccaaaatgcttccagctcatgggttctcctctgctgcttgtctccagcgtggtacaggtgcccgcacagtggcacacagcgggtgcgtgaacagcaggagccaatcagttggatgatcagcctttggacatagtgagtacattccataagtcagttggatggagggagtaagtcagtagggaaaccaaggtttagggttctacctgtgttgggcatcccttccctggacagacaactctgtgagagaaatcccaatagcgtcagcttggggccacggcttcagggtgccacagtgggtagggccagggcaaggaaatagtgaagtcctctctcgaagagcagtccaccagagggccctcccagagggcggggcttctgcccagagcaaggaaaaggctccgggagacggacccacccacttctattgaagcctagctggggccagctctggggtcctgccagacacagcagtgctttgtatccaggctcctactacagccaccagggtgggggcgctttgtattgtaaatttccatggagaattatgtcttaatgtatggtaatcctcggacctgggggctgtgctgtccttacgcctgtgggagtctagaccgcccctggaggagggctggagagcgcaagtgacgtgtgggggtcaaaggggcgtgtcctggagacccagggattccctgagttgagctttggggaccctctgaagcaggttgtctggcctagcttcctgcttattggccagccctccaaggaacctgactctggttttagaccagaactggccttggggctctctgcgtatcaggtactggctcctgatccttccgtgctgggagaacacatgacttcttggctcagcttaggctcggagtgagcgacgctgtgcccctgccctatgggggagcgggggtggatgctagggtgggtgtcggggctgtggagagatccagtgatccggcgttcagtggctttttgctcagtctctagagaaagggggacagcccgggagctcccctgggaagaacaagccatgtgatcagatgacaggtaccaaggccctggggctggggcttggcttctgtcccaagctgtggattttcctgctcttgaatggttctttggatatttattggagtcaagttgctgtaggggagcaaagaagcagaggaggctgtgggctggtcggatagtccaatctcccaagttgagcgactgctgcgggtaggatgctgatagggtgagtgagctcagcaggggaagagcaggcactggacatgggaaccatgaggagaggggagaaagccacaactgctaccaccgcagaaagggaagagtacttttggggcccctccccctccccctccccctggcggtctcctgcagtttaaccttgctctgccttctgccccctctcctccctcctcctcctcctcccctctctcttcttcctcctctctcctgcnnnnnnnnnnnnnnnnnnnnnnnnnnnnnnnnnnnnnnnnnnnnnnnnnnnnnnnnnnnnnnnnnnnnnnnnnnnnnnnnnnnnnnnnnnnnnnnnnnnnnnnnnnnnnnnnnnnnnnnnnnnnnnnnnnnnnnnnnnnnnnnnnnnnccctccccctcccccctttagccccacccctgcccccttcccctcctttctgcctctctccctcctggcttattcccctgcttcctatctccttttccttcttcctgctccctcctgtgcactgcccgccccctccccccacccccttaagtagcatctgtttcagaagccaggaattggcctctacacacactttagccatcttccccatccctcccaggaaggctgaatcccccgctgcagaagtgagggggcctggcagggtgtgtatgtgtgtaagacacacacaccccagcattctgcaccaagactgcctgcaccttagtcctggactaactgcctctaggactgaggagggcacccctgccatgttcccacaggtacgtggtggcctgtgcaggaagccctcctgttatcttctggtccctccctgaaggaccagacccattgctagaggggcaggcgatttttggagaagggggtggtggtattaggtgatcagacccacggctagccaatgagctcagctctgccaccaagctgcccttttgttgtgtattttgagattgagtctccctggagtttcccagattggcctttgaacctactatggtcctcttgcttcagcctcccaagcagcctgagccaccacaacctcatacttggagggagggaccagtgtgggggaggtaccctaagttcctgaaacataggcaagttgactgccaggagatagggaggccaaattgccaagccggggaaggtggtgatagatgctaagctgagacaggatgagaactgttcacccctaacaggcctgagccccgtagcaatggtcgagaagggctggagaagagcttcccagagtgtggagagatccagcaagccttccatgggagctccaccaggctggggaggagacaggggacaggggacttgttgctcttggctacatattgaaggacaggcaccagggacactggtgcctggatctttctgagcctagggcaaatgagactgatttcttgcctagttctcctgcctgcttttcattacctcggccttctagagcaggaaggatggagtcctgccccctccccagccgtcagcccccagagaggtgcccagcgtgtatagaaacacaagccccctgggctgtgtttcccataggaaggtggggctggcctggaactctgcattttccaagtccccaagaggattataggaagcagatcctgcaacatgggctgtctagggtggagatgccaggctttccccgggggcctctgctctcactctagctgtggcagcaagagaggcgagaacactcggtgcccccccaccccccagccaacaggagcctggtgtcatctcacctagcgctctgaacctggcaagtgtgtgcagatgcatttagcacccgtgcaggctttgaaaacattccccctcttccccagggtggcagcaccccctgattaatgtgtctctgcaagaaggagcttgccagcattccacatgaccttggctcccagcgcctctgccttcagggtgggtctcagctgccgaggttggctggggttcagaggtcagggagacccccccctagcctttgaacagcgagttcagagtcagaggtggggttctgggattctcttgggggcccagacagtaccaggaggacccaggctaagggcatttccctgcgtagctggcgtgtagggtagtctttgctctctctgcacgggtctctgcagactgacacctgggccagcgtaccccaagtccaggcctctgtgctgatggaaacagagtctgttcacagttcagggtatctgggacggggatggcctgtctcacaccacacccttttctcttaatgccttctccttccctggatcccgtctgcacagccagccccacagttggtcgactgctgccttgtcacttagctgttctgagccagcgaccgggaggccccgcaaactgtggcatttgctgagcgtaaaaattcaattaattccagaaggcagattaaatataagtgagttttaataatttgctgtaaagtcggagattactgtgggcacgaagagaggaacacacgtgtgtgtgcctgagcaggctggcacagccccagggacccagctggggataggctggggtagcttcctggagccttgcttccccccacctcgcccccagaacactgccctgtcctcgaggggaccccatcctctgagatgcttacctgaattctccaactgagatttgggaggacagcagaccaagagtagcccagccttcaggaactgagactgagagccctgtgtatctcactgtgagcaggaccctgctcctcagtggcttccacccccagactcacctctctctgccagtgactactcagtgtgttcttaggtcagggtctagcatgcttttgcttttatacctttttaattttaattttaattttctttcaataatttatttatttttaattccctttacatcccgatcgagcccccacctctcctcccagtctctcccattatcccctcccccctcttctcagagaaggggaagcccccttgggtatcactcccccacgggatgccaaagtcccagcaggaccagttacatcatctcctgctgaggcccaaccaggaagtccaggtaggggaagggaagccaacatccaatggcaggtaagagagtcagagacagccccaggctgatccacttgaagaccaagctgcacatctgctacaaacagggggccttgcgccagccaactttattttattttgagacggggtctctcgtagcttaggctggccttagaagtcactgtgtggctgaggatgaccttgaacccctgatcctcctgacttcccctcccaagtgcagggattacaggctgtgctgctgtgcactgttgattccatgctgggattgatcctagcctagggcttcatacaggctaggtcaaccgagccacagcccccaacccagtcgtagctttttagaaagtcatacacgagagaatgtaggtggctgctgaccagaagaccctgggcctaaacacacacacacacacacacacacacacacacacacacacacaagcgctaatgtgaactcgcacatgcaaactcgtccgcagacacccaccttatcacacccctccctccctgatagccaaaacgccagctatctaccccacccccaccccccagcctgtgccgggtcccgaagcctccagagctcttcttttgtccacctcccaactcaaaaaacaaaagctgagacctggcccccctcctggtagagccatcaaagtgaagaagcctgacccagaaaaggcagttggtagaggggtgtctggggcctccttggcttccctggtggcggctgggggggagggggcgtcggagggagcaacagcttttatgtagggacagtgataacccactaagtacaaaccaccatttcaaagcggcttcatcaccgccacatcccactgcgatgtctatagattcctttgtcaccttcaattggccctaattacggagccagaggctgcccgatcagcttcactcttgtcatgaaatcctgagggcacgcacggggacagcgacacaggcttgccagctgcacagcccgcagaccggccttgggtctttgtgtgtgtccctgtgtgtgtacccgtgctcgcgtgtttggaggcctgtcctcccctgtcctgtgtgctttggctggctggatctcctggatttaggggtgggggggnnnnnnnnnnnnnnnnnnnnnnnnnnnnnnnnnnnnnnnnnnnnnnnnnnnnnnnnnnnnnnnnnnnnnnnnnnnnnnnnnnnnnnnnnnnnnnnnnnnnnnnnnnnnnnnnnnnnnnnnnnnnnnnnnnnnnnnnnnnnnnnnnnnnnnnnnnnnnnnnnnnnnnnnnnnnnnnnnnnnnnnnnnnnnnnnnnnnnnnnnnnnnnnnnnnnnnnnnnnnnnnnnnnnnnnnnnnnnnnnnnnnnnnnnnnnnnnnnnnnnnnnnnnnnnnnnnnnnnnnnnnnnnnnnnnnnnnnnnnnnnnnnnnnnnnnnnnnnnnnnnnnnnnnnnnnnnnnnnntttctctcccaagctccttcctacaaggtgatgtgtttggaggcccagcaaggctggttctccatacgactttcccgtcctccctctccttaccccccttcccgttttatgcctttttaatatttaaagctgtcgttgggctgagccataaaattctttcaaatcgaattttattctccaatctcaagttctggcttcactctggcgggaagagttagttggttgagggggggggtggcagcggtagggcgtgggggtaggggaggggaatgctgttgtgtccaagtgtctggtgtcctgagagtcccctgagtgatccatcttctgtctccagcacttacgggatcaatggtgtgtgtgtgtgggggggggggtgatggtggcaggggttgtgcttgaacctgatgtcacttgtgagagccatcccagatagcccagggaagggtggtcacttaaaatcccaagtacatatccagccagagggtctgcctgaatgtgtgtctgcgcaccatgtgcgtgcctggtacccatggaggtcagaaaaggacatcaagtcctgcggaagtggagtcacagttggttgtcagctaccgagtaggtgctgggaatcaaaccccagtcctggaagcgtaacagatcctccaagccatcttttaaaagtgagagcagacagagccgcctgagttttgatgcttgcagcttctacctggcttgtctggggaggggctggcaggacctaggaagagtgtactaggcctctagacaccaatctctctctgggtcctagaggcctctctctccctgttggtctctagggtattcaaggtcaggcctgtccaggtggctctgagccatttgagcctgagggcctctgcccgccctttagtcttgttggtgacttgaataaggtaataattctgtttgggggttggagcctgctgcttgtagatgtggtccatacttcatggagaagaatggcttccactgttgcatatggcccctccagacttctcttgcatcttgcaggattgttgctggttacaggtgggtggttatcttcttgctgtccacaacccttccattgtcattaccgtctgtgggtccttcctgggctttttttgtaaagctgacttcaatgtcagttctgctaccctgggggtcagggagacagacttcagctgtgacccaggcgttgctcacgtgtgctttggggtgctctgccagcctgcctgggttctcttcctgcctctgccactcactggctgtgtggcaagggactcaacctctctgtgactcgctcgcctacctgtaaaatggggacaagaggataagccgcacctcagtgggaggtgggaactgccatggaataacacagatggtgctgccattgacagtaaatttctgtctgggtgtggtgatgcctgctgcctgtccctctcagcactgggtagatggagactggatgagcaggagctccaggctagcctgggctacttcagtccacatcctttaaaaaaaaaattgaattttctatcagttatctttgatacctcaggagtgtctccattcacagatcaggcccctgggcctgctgggataaatttaggggttcgaatctggtgtctggggtgaacagcttaacttccagctcccttctcggaggctaggcacccacaggcaggtttgtctgggtgcttcaaggaggaggagttgggctcagcctgacctctggttcttattctacacacggcctttctctttcagttcttgggttcagatggcctgggtcactgttaatgattctccttcacacaaagtcacacactcaggtcccaggggtggggtctttaccacctaagttgtcagttctcccccacaactccccccacccccaatattggctcctacaggggctccaggatcattccctgccctcctgggagcagggccagtccagctgtctggcagccacgcctcctggccaagagtgcagccgggcttggtgggctcccaggccccgcccctcccaccccctcgcccctcccaccccctcgcctcgctctgagctttgcgcatggaaagtttaacttgcttcttgatagccagccccctgctcacgcctgggctccggggatccctgttgtcacctcatctctcccttgctcccggcccatagaccctgtcctctgagggctgtgctcaagggcagcttccggtagcttccatttgattttaaataattccagagatcagaaagagaaatgtgtgtccccatctgccaaggggcctgactgagtgcctctttattgcactatcccatgtagaggccgagctggttcaagcctggcctccagctgactcacatgacccgtgtgttcctctgtgtgtgtgtgtgtgtgtgtgtgtgtgtgtgtgtgtgtgtgtgtgtgtatctgtctgtctgtctgtctgtctgtctgtctgcctgtctgtgttctgcagactggagaaggcaaaagaggacagctctcctcttagggtggggatgcatgggacacatcaaacctgggatgttctggtctgcagatctgactcccaccttgggcagtatctgtagggcccatggagaagaaaaaaaaaaggaataaaaatttttttaaatcggatgggagaaataaaggggtgaatgtcgctgcggagccccagttgctggcagatggtcctggtattagagaaatgaaaatatatgttgtaaattcactatttgccagtgctaatttcttatcccaaggtagagacttcccctggccctctccacacaccatctgcacattcataaaatgtattacagcggaattgatggggcgacagagtgcaagaggctctgggtgatcaccctcctcaggcaggggatgtgggaggaagcccctcccacatgcttgcgaccacttcccctgcagggccttgtgggtgggtgggtttgtggtctcccatcttcagctcggcttcaacgatggatgcagcctggaccaagcatggcttctcttactgatgtggtttatagagcagaggcctgaggggggcttgttaggcacagccctggcctgcggttcctgtgggggtcagtgtaagactgagttcgaggcctgatgttgccccttcctgggcctttcctgctcatcctaggccttcctggactgaacctcaagcctgtgtggttctagccttgcaggccacggttgacaactgctcccctgtggcaaacccctggaagtcccttcggaggccggagactgttctcagcagtgacaggttccagggctgagtacattctccatctggctccttgcatttgagagtttttgccaagacagagctgggcttctaggagcagtgtgtcccctctgggacattagttgggagagcagccttggggcctcttggaaccatggatatgagcagagccaatgtcctactgaggcttctccattccccttgcctgctccgtccttaccttagaggcggtgccccaccccagtccttgaggctgctaattgtcaatgtgtgaatagcttttatgaccagctagagccccacatctggtcagtttgctgtatcagtaattgagcctgtgcaaccgggccagctccctaggggaagtgattaaggctgtcctctgtcacgaatgagccagcagaacccaggaccttcactatttctcaggattgatggccccatctgtgacctttgctggatcaagaaggatcactgaaaacattctgtttccggagttttcaagctgcaaacgtcccctgtggacaggagcagcagcctgaaagctgccatcccgttatgaacagggcatgccttcctggaagaggaggcagccagcccctcactccctggtaccctcagggtgagtgctccacagctgggggaggagctagtttgcagaaggctgggtgcaggtgggtgggcccaggtacttctttcctgtcatcttgcctcacccatccagatgcccctggctcagactgttgacagcgatgcttcccagcttctctctcaggctctcaagtgtgcactgtagaaacccagaacagcatccaggttcctgagggggcagtcctaatggttttcaggtgaagcagggctattgagttgcaaactggcatagctgagggaggcagaaagcagagggctaaggcctctaggtactagtgtgagtgggtggggcctggcggagctggaatgctgagtgggtggggcctggtggaactgggatgctgagtgggtggggcctggtggaactgggactctgagtgggtagaaactggcgatgctgagtgggtagggcctgtggagctggaatgctgagtgggtggggcctggtggagctgggattctgagtgggtgtggcttggtggagctggatgctaagtgggtgtggcctggtggaactgggactctgagtgggtggagcctgatggagctgagactcttgagtaggtagggcctggtagagctgggatgcccactgggtggaacgctatggatccagggatgctgagtaggtggggcctggtggagctgggatgctgagtgggtggggctttctggaaaggcaggattcttggcattcactagtttctcaagggaatgctacttatgagtgtgctgcgcgcgcgcgcgtgtgtgtgtgtgtgtgtgtgtgtgtacatgcacatatgtatatgtgtgtgtccaggacctggcctccaaggagcccgaatcccaaaggatacccctctccttccctgctcgagtgaccatgagtatcgctctcctggcgtgttgtccctggtgttggcagagactcagctcaaggaagcacagacttggagccctagtggcagagttatgggtgtatttctgtggtgttgaagcttttcaaagtgctggagatttgtctggaccaaaaaggaaaaagtctttcttctctgtggcttactttttacctacccagggctacaaggacagaacggtctagatctgcagagaaccctagccacaatctgttgagcctcctcgctgaacgactgaggcatggcagcggctgggtcaccatcaagcctcaggtgaccggtacctacgaaggctcctcagctcagcacacatggcctctgcacatccagcccatagcccctctgcttaggaggcagcttccagaatgggaggggtagagatggcaaggctggggggctctttgttggtttgttttcatgtttccacttgggagcttgtcattgtcacttcaatgtcttccgtgtgcaatgaaggtgtgaagaccccagatccgcatctttggacaagctggggacctgctctgggcatcacacagaaagatgaccaaccacagcaccccacatacagattatttaagaggacagggttggaggaagccagctctgagggatgtcctttaatcaccagtggttacaccatcttttctaggtctcttctcccactggtcaggcagcccagggagatttagatgtccttcgacacccccccccccaatcttctagacttgcaaagaagccaggatccctatctctagtccctttgaagatccggtttttttcttctttatttgatttattgagacagggtgtctctgtgtagccctggctgtcccggaactaactctgtagcccaggctggactccaacttagagaaccgcctgcctctgcctcctcctaggtggtaggattagaggtgtgtgccaccgggggcccagccccttcagagacttggaaactgagctccgagaccacgagaaacctgctgcggatggcagaatgaccagacagggagcttagacctgccttgggtgtcctgatcttggtggttgcgtcgtcatggtgactgttacctatctgaacagacctgttctcaccgggtgccctgacaggagttccctgtctagcagctcgcttggaggcacaggctcagagataccctgccctgctcttagtaacctagatctgctaggaggttggcttagccgttgaggtccaccctctgagtgagcgcggccgccctcagcctcagtctccaaatccgagaaaggaccgcagtgacatgcagactaaacgtgaatgatgtaacttcccaggattgccaaggtgggatcctccttgtaccagccggccttgaagacaattaaccagcacctttccttcttgccctcccatccgcccctagagccgcccatccaagcaggggtggcggctgcctgtagtcttagcagctgtttctcagtttcttcagccaggattgagcagacccggcgacaccaggctctccacagagtccttcaggccagatgccttgcttttccttcccaagaggcctgatgtcatcttgggaacagccagaaaggggcaggagtcagggaggagttatttccactgctgcccctccctcacccgcttccccccctccccagccctgcccctgacatggccctggaacctcccacagcctctcctcccacttgctccccccacccccgcccccacccccaggccctgccctgggccagcacagtctgtgtgaatgtctaatctccaattttattctgctgggctacagcccatttgcataatccacacaggcaccctggttttaattgcccacaactctgcagaaagatcatgtggttaagtggtaaatcataattagataaataattggtttggccacagcaagctgcttctgtttcacctgccatctgccggacccggtttctcttctggccggaacaatgcgcttctgatgacagagcacactgctgctcccttgtgggggcggagggggctgagcggaggggcttggaaaccgagcctggaaaagtgcccgattgctggggtctctttccccaagccaggcaagccccacacttgccattcgccctgtgtgggtaggggcgggggagagttctggatctgctgtagaaagggaggcttgggtctgagcagagcggggccgggactggcttgcttggacctgggatcacctgtgtagggccgacctgggggcctcattccttggggctctgagggagttggtgggcagagctggagcaggcaggcctccctgcctaccatggtcagcttgcccatctggtgtttgctggaaactcctttctctccacactgtaggcccatatgtgagccaagtctctgggggaattgggatgctgggctggttggtcgcctggctgggtcttcctgggggccgccggctattcgggctggtcttctgctggtcttcagcccccctggataccatggctgcttccagttgcctttcctttatgcgtcctcacagacatgagcgcctgcactcaccagtgccttccctgtgctggccagcacttctgctcactctcaggcctgtgcttctgcctgggggctgagtatggatggatgaataccaagatcctcgcctccaggccttgattctagggctgtcccgactgagtttgcctgcacagcggctcaggaagctacccctctccccagactccaggtttgtcttctcaactccgtggaggacagtctggatgctcaggaccacacacactgaaactctgagccctgtgggaatgagggccaccactgcacacagctgaagcccattggctccccagccatacactgtgtcctcctgaagcccacagttgcttctggggtgcctcaggatgggctccatatgtctaaactatggaactgctagataaattctgtgtttttccagcatgcaggcacccacccattctttatcttttttttctctctctctctctcttttcttttcttcttttggctagaactcataaagatctacctgcctctgccattagagggctgaggctaaaggaggcgtgagagtgccaccgctgccagctccctcttccttttctattcatcatccactttccttccttccgtgtgccagtcacccttttcccatctttcttccatctgtctgctcatccatccattttgcctatctctccatcaacccatctgcccatccatccatccatccagtcatctatccattcaattattcatccagctatccagccatccaactatccatctacccatccatccatctgcctttctctccatcaacccatctgtgcatctatccatctatccatttatccatccatccatccatccatccatccatccatccatccatctgcctatctctccatcaatccatccatccatccatccatctgcctatctctccatcaatccatccatccacccatccatccatcagcctatctctccatcaatccacccacccacccatcaatctatcatctattatccatctatccatccatctaaccactcacccatccgccaatccatcattcaaccacctacctgtccatcaatctatccacttactcacccatccatttattcccctgcccacctaaccatccatgtgcacactcatccatttttttctcacccttctatccatcttccttccttctgtcatcgcccactcttctgtccttccttccgtgttcctcccatatctcttctcccatccctctgctcacccacctgaaattgggctttgagcagctttggcctcagccctctgtgctgacttgtgaagtgaggccctaaagcagtttaccgagaatggagaagaaactgggctttaccgtgttctagactcggcttttcaaatgtctatactggggatccgggggccagactctccgaggctgtgttctgggctcttcagacgttccgcctgtttctccgtaagcacatgtgaatgtcaggactcagtcacctctttccttggcgcacaggctgtggccatagctggatccagatgtccgttctgcccggcaccactgaccacatgtggctattgaaaattgagattaagtgaacctaacaattctgtgtcttagtcgcaccggccacattccaggtgctcagtggccacttggggctgggatggcttttctatgacaggtttttctggatttactcagaggtattcttaaataaacagatggatcccctcagctataactgggttcaggctagatctttctggattctcccctaactggatgccggagggaggactgagcctggactcgtgtttagttgttgtctgtctgtggtgccatgtggcttcggtctagccacttggtgtgtctgactcatcgaggggcatggtggcagctgggtcccattgcttgtaggactgactgtctgtgttcttcccggcttggggactttgctgtggaaccacagacgtaagagcagctggtgcagtctgagatactgctgctgacaaggctactggagagcagtgtttccatttttttttcttggcctggggtttttctcgctcctgtgctaggcagaccccttatagggaccctgcagccttctgccccacttgtgatatgatatgctctgttagacagggcagctcggtggaccatctagtcctcagacctccctggcccttgctggatcagtgtcagtttctaaggtgagccgtcctcgtagtgcctgccacgggagacgtgcatcaaaccagctttcacctttcgggaacagtcccgcttgattcatagaggcttaggagaaccagctcttcccacagccacgtgggcgacagctagccctatcgccaccgcaagagtcccaactaaggccaggatgtgtccctaagtgggtatggaagagtgctcggggctggggctgcttcctgtgcctgggtggctcggctgaatgtaccatgtatgttcatgccagcgggctctgagacactggtcactgtgttcattctgtcatctcggtcactcagtggcagggtggtgataggtgataggtgccagacaccaccaaggctaccaccacccctcccctaagccatggtacctctgggcccaccccttccatgcctcttaattattttccttggctgttgtgaattaaatctcccaataaccgcaggagacatctttgggtacggcctgctcacatctccggcacccacagaagtcgttaaacgaataacgttaactttctccagggatccaattctctctgaatgtaattctcctctcagttactgggagccgcttaggaaaaaaaaatataaaagaataagcagaagttcctaaggcttcctcagatcctgttgggagggaggagagtcgcttgaaattaacttttaagagaggatcacagccgctcagtggtggcgcacgcctttaatcccagcacttgggaggcagaggcaggcggatttctgagttcgaggccagcctggtctacagagtgagttccaggacagccagggatacacaaagaaaccctgtctcgaagaaaaaaagagagagagaggatcacaccacagcttgatggtagaagaagctggtgtctgggtggttctgatggggatgagtgcgcgtgcccagggtcctgggaagggggtgtgtgtggggggtgacttgtgatgttggctctcagatctaccctggatccccatgccaggggtactgatagaagcaggtaggacagtgactcagctttgatgtggaggcttggccactgggttcttgctggtggaactggagggttgctggtacacagcagccatggaggtgacctgtagaccgcttgtctgtgttctgcaggggtgtggctgtgagccactttgtcttatctgccattgtaggccccagctattcagttctcctgctgggtgttcctcttgtttctcctgctcctcttcctcctcctggtccttctgtgtctcttgatcctcctcctcttcctcctccctcctcctcttcctcctccctcctcctccctcttgctcctccctcaccttttgtcttcctcttcccccctcctcctctctgtctctccatctgctcccacccagacatcacctggggcacaggtgaggctgtcaccccaactgtgagcagacaaggctcttaatgtgcctcctttctctgacagtacagtgaccactgttcccgttacagaggcttgctaaggtcccccatcgtcaggtcctggagctgtgacctgggactctggtctgtgactcctgaggggtttcaggtcatccataaatgtgtcttcctgtagctctgtgtagctggccagggacccatctcctcctctaggccaccccacactacacagcaccctggagtagagcccggtctcacggtgccactttggtttattaatgggagcacttggagggaggcagcgtgcagcacgggggactttcccaaggtcatgagcagtttgttggatgagccaggaatagaactccttagctgggctgtgttaaccctgagctcaaattgccagccagccaggcaggtcagcacagagggcgggagtggagtggggctcagcttctgaaacaggggaggcagcagaacctagaggaggaggccctgtgctctctgtagccctgtcaatcccaggagaggagggcgtggtgatctatggtggattgcagggagcacacagcctccttcttagctgatgctgtgtgggctggaaagagacagccaagccttgttcagaacccagtgatctcaagatgggaggggctagaggacagcctttgccctacacacacacacacacacacacacacacacacacacacacacacacgacaccccgatgctacgtcaccagtgcggtcatttctgaaccaggctctcccgagtactccatggctgcctgtaccccttctccaccactttgcttttgggacgcccctgggtagctaacgaggtgtgcatatcaaggtgaaagctgctgacttgccctgggtctctgaacccagtaggaataggaagtgaaggggtagaggtgtctgcttgggcttccaacctggaagcctccctggaggaggtgagctttttggtctgaggctgcagagtggggagagctgttcaaggtggagagttggaagggccaagcaaggctccaggctaagcagagctggaagtgagagggaggctgggggcccggggaggttggaaatacagcgtctaaataccaaatacgtggccttgagggtagagatgcagggggtgcagcctctggggaaccacagagtgggccaagaggaaatgccacttgtaaaagtaggaggtgctgctgttggagtctaagggatggaggcagcaggagagggaagtcccctttgtcaccaagtccctggggagcctgagaaaggaaggatacaagtgcagtggtccctctagggcagctttcagcgaggctggacaccagcagccagcctggtgtctgctccatgccacaggaagagaagagatgcttttgggccggacccggatgcggcaccagactgtggtgcaactgaaggcccatctggggaaaatgcagagcttataaggatgggggggggggtggcggaaactgaggcagggatgctgctgaggcctgctgcccctcaccggaacaccatttcttcactgtgaaatggctcatgtcgaacgaaccttccctccttggttatctcagcctgtgacactaaatggcagggacaggaacatgagaacaagggctgaaggatccttgcagctgcctggagctggcaaaggcaagatctgaccttggggaccccagaatgtcctctccaggcactggggacacaggggtttgtgaccctgtgcaggtgtttctatcctggagtttacaagccacagaggcctctgggatctgctggtttctgtgacaggctgggactctagtgacaggcagtgggaaaaccaagacaagaatgagaggctgggaaacaaggcaggtatttggccagctggggaggccacgcctatgatcccattccccgggaagctgggccgggagggttgagagttcgaggctacctgggctacagtgaaaagccttatttccaaaaggactaaaggcaaaaacgtaaggcacggtagtgttcggctttaaccccagcacttgaggggcagaggcaggtgagtatgagtttgaggccagcctggtccacagagtgctagcatagccagagctatacagagaacccccccaccccaccccaccccccgtctcaaaacacacacacacacacacacacacacacacacggttgggggtggagagggagagagaggggcaggggagagtaactgtaatgttctctgggtgaaacaccaacccccacgttctgcagccatgacactgcctgagtctcaggtaccacagaggcccagaaggctctcagcagtcagggaaacatggcccgttatggaccttcaacccatatcagtgtgcaaaaggttaggggtgcctccagtctgggaggtttgcaggccaagggggcttgcctggagccggagccggtccagcttttaaatctgtagggagagtcacaaaactccaacacccatttgtgtggaatccttagggtctgtgtgggtacatgtggagttcctgggggacaccccctagatctctctgtcctagagtatgtggcctggactgggacttggtgaggccgtcctccctcttatccagacgattgcccagacagagagacagctgtgggaaggaggcagagtcgctcctgcagtgctctggctctgtgagtggactggttaagaagtcggaaggttcactgccctcctgttaccctataagaaaggggtgcaggattggggcctcccacgcacctggctcccctgcctgccccatcctgggctgctctgccccatcccccaacccctacccaggtcacagctgtctgctttgcagcaggtggcaagagcgcctggaggtcctgtgtggagacaggtgtacattccaatgtcaccacccccaggtgctcaggagttccaggccccaggctggggaagaccagaggtctgcagcttttttttgggggggggggggagggaggcctcagcaggagggatggggcttggtgacctttctagcctgagggctgagagccacgaggtaatgcagctgcagtgtctttaagtcctcagagcacagagtctgggaaagttccttggggcaaggctcagtggcatctgaccgtttcctgtgaccacgcgtccgtccaaagtgcccacaggcgagggtgctgctggaaggggagtttccaaggtctgctggggtcccctggaaaacacccaccctcccctagcctgcagcttccatgttaaagcgcaaagtacttccagcactttggcgtgggggaggggagagtgtcaagcttagtagtcatttcaactacatagaaaattccaagccagttttggatgcagaagaccctgtataaaaataccaaatgttgggggtgggggatggggtggctccctgggttgtggtgtttgccactaagcctcgggtctggagttcaggcagcagaactcacagggtagatagagagcgaactttgagagttgttccctctatgatatatgtgtacacacatacatgcacaagataaaattttgttaaaaaaaaattcagtgttcacacctgtcattccaggtgaggcagagaggtcttgaattctaagctagcctgggctatatagagtgatttccaggccagcctgggctatggagtaaagggactatctcaaagagaaaaaaaaagcaaacaaacaaacttgtgcggtccagtggcatttagcacgtacacagtgttgtgcaaccacgcgcctgtcgtccttgaaccagaacagacccgtcacccaggaaactgcccccacaagagcagccactcctccccccaggagctgctaatgcatctgctgtctgcctctgtgatctgcccattctggacattgcatatttgggactcacgtgacagccttggggtatggcctctgcccttccccaccatgtttttccatcttgttatggtcaagcttgcttgcttgttctttcttgcttcctttcctttcctttcctttcctttcctttcctttcctttcctttcctttcctttcctttcctttccttcccctcccctctctccctctctctctcccctnnnnnnnnnnnnnnnnnnnnnnnnnnnnnnnnnnnnnnnnnnnnnnnnnnnnnnnnnnnnnnnnnnnnnnnnnnnnnnnnnnnnnnnnnnnnnnnnnnnnnnnnnnnnnnnnnnnnnnnnnnnnnnnnnnnnnnnnnnnnnnnnnnnnnnnnnnnnnnnnnnnnnnnnnnnnnnnnnnnnnnnnnnnnnnnnnnnnnnnnnnnnnnnnnnnnnnnnnnnnnnnnnnnnnnnnnnnnnnnnnnnnnnnnnnnnnnnntctcccccctccctctcttcctttttttcatttgtttttgagacagggtttcactttttagccctggctgtcttggaactcactctggagaccaggctggccttgaacttggagatttgcctgcctctgtctccagagtgctgggactaaaggcacggtaccacaattaacacctggcttctttctcttttttgaaacaggatttctccctactgagtgtggtaggtagtgtgggcctttaatcccagcaccctgcattccaggacagccatggctacctagagaaaccaggtcttagaaaaacaaaaccaaaaaagacaagtttctctttgtgttgcatcctgctccagcctcccggatgctaggattagaggtatgagcagccatttcttcttaggaccagacagtactccactgaatggacataccacgctcttaaaactcattccctggggctggatagatggctcagcggttaaaagcactgactgctcttctgaaggtcctgagttcaaatcccagcaaccccatggtggctcacaaccatctgtaatgagatctggtgccctcttcttgtgtgttggaagatagctacagtgtacttatgtgtaataataaataaatcttaaaaaaagaaaaaaaacaaacaaacctcattccccagcaaggtatcaggaccttttgacatctgtctaattaattgaacatctgtgagggatgcttgtatcgtctgttctttgtccctgaatttatctaccgtataatacatatcgggaccctgtaatttttttttcatggcttaatagtccaccatagcttggttttgtggttattcacaggtgggctggactggcaatctggagaggtgtttggaagagaccagccaggccgagagacctgaagcatagaaggggctgtctgtgctctcttttccaagttgctggtctgatggttgtaccattaggaagagaggggagtccttgctatcccaggctgcctaggatcaaggggcgggcctcccagtgacatcattcacaaaaatcattttcttcctatttttaaaattttttttcttctttttttcctttttgagacacggtttctctgtatagtcctggctgtcttggaactcactctgtagaccaggctggcctggaactcagaaatccgcctgcctctgcctcccgggtgggagcgccaccactgcccggcctaaaaatcctctcctctcctctcctctcctctcctctcctctcccctcccctccccnnnnnnnnnnnnnnnnnnnnnnnnnnnnnnnnnnnnncccctcccctccccctctcctcttttttctttttgttattccctgtcctcagggtgaacggaaggaatttcgtgactcagctgatagtcctaatcctcgggcttggtcctttctaggttcctgttctcaggcaggtgggaggtgtctgtacatcagctctagaaacctgggcaccagccacacacatacaccgttgacctctcctacaagcaagaactgggactcggggagctgtattcaaggcttgctcttgagagttgagaactgactgtgtagcacgtgctaggatagtccagcctcggcactgctgaggtaaaacacacagcttgtgtttaaatcatccctgaacagcacggggtcgtgtgggaaaggtctgagtgtgggctggtaggtgggaaaccacaaagacacgaactgttccgtggctggctggaagcacggtaggagggatgagggagtgtccaagggtcccaggcctcaagaccaagctgggacacaggcccaggagaagccagttctgacaggaacagaagctaggaagaagggcagcttgttcactgaaaatccggttttgtgtaggtgaagaaaatgggggctcccactgatggctggtcaccgctcttggacacagactcacccacccttgtgctgtgtgcccttgaagtcagggcccctccccccctcccgctgcctgggtgctggctctctctctctctctctctctctctctctctctctctctctctctctctctctctttccactcaggcctgccaggtagtcaggacagtcaggactagatgcgattctggctgttcggcgctttcataaaagcctgctaaaataagaccactcagggacagggcctcctggctctccgtcacaaatgttgacagtggagaaaacgtggccaggttcctctcaaatataaaaatagggagtaggcatggaagggaatggaaacctggcaccccccacggggatggcactgaggtgcaggacaagggccttttggggggacagctcctgagtggggtagggtagggaggcggcggggggtgttgtctcctccatggctcgccactgtgtgatgagggtgtaaagttgccagaccaggctgggcaagcagagagaagaggctgtaatggagttgggggtgatggtaactggggacttctgaggcttggactgtggacagctgtagggctctccccaggaattcacaagccaagaacttggacctgagcagggccaggccactgagagcagttggtgacagaaatgtagtgccagcagtctcaaaccacctcctgggagtctctgtcctctggaaggagggtccaagcaacccccttccaccccttcctcccctgccaggccctggcccagccatataaagtttaaaggttttaaatgcaaatatttctcttttatagatgccagctgtctccagagagtgcgatttctccttgctcaacttcatggtccaattagcctctcatatctgagtcctagagagctgggggggggggggtggctgggctctgagccggtggcttagtaagctgttgtcaggggtggcttgcggtagactgggtggagggggtgctttgtagggggaggggccttgagccagcaaggataggaagctgctcccagctgtctgctcgggcggggtgggcggggcggggcggggtggggagaaggttaggggctgggtccactggggtggaggggctggccaagggttaggtacagattttgaggctccgggtggagatgcaggaacaggggcagttggtggccaggacattcttctcctgtttagaaacataaaggcaggcagcctgcgcacactggctcccttcttctcccctcaagtgccctcttcccgcccgccttccagccgtgggccacggcgtccccattcaccggggctcggaggcgctcacaaagcgaggcaattagaattgaaaatctatgcaaaacagctgttaactggttgtaaaagagtgcagctgtgtgcggggcgcgggtgggagccggcgctgaaagcgcaggaagtggcgccgaggcccagggttaagaggaaaactccccaatgggccgaggggatccgccaggtcttagccccttcctgctgcctgggtgacctcagtccccaacagccagccgtcagacccgcatgttagatggaaaggagtccactttagaaggtcaccggctgccttccgttccccgctgtcccgcatcatgtcctgggtcagcaagcctgagttacaggcagttagagcctgcttgccagccccccagccctgggcagtcactgctgtgagacaagggtctcccccccccccccccagaacagggtgtcattcccatacaccctagaacagtttagtcagggtaaatgcgccttcccaggcccacttttgtctgaaccggtaagaccagcctggaaaggtgagttccagaggcagagatgggaaagccttctaagagcatagatctgagcagggttttgaaggatggctgctgatgtggaagagggaagagaaagaaagtggagccgggtttgagggcttgccagctgctgtggagagcctggctcaggtggtcaggatggatggagtctgggcagaccctctttctctgcttctcagccccccttccaccagggtggttttctgggtaccaagagttcatccagagacttagcaaaagcaaaaatgctagaaacccaaggccagtggcgcccccccccccttctgcagggtttcctactgctgcagaggaagagcctgaactcagagacaccacctccctgcctggataactagggtaacaaactccgctgaaggtctcctagttgggggtgtgtggggggtgtggattgtcggaatactgccaggtgtaagtaagcaaccgtaggtcaggcttgtgttccagtttcagaaccttgaggcaggttcattgacacttggaagtggtgctcaccacctgcctggccagacctggagggcactggatgacaagagcccagcaagtctttgctgggaaagtttctttgtgatggctaagtctggtccatgctgcagtctagggctccagtgtatggaggtgcagctgccgggggacaaagcagtcgcctctggtgagggcagcggactggtcaaaactggaaaccacatcatcttatgtcttcctgcccagccccaggaggaaaagactgggaggcacttgacctccagggctcacttcagacggggttcaggtgggaacacgaccttggtgaaggaggctctaagcctgcagcctgctctctcacctccctaactctggctgcctcacatgcccgcctgtgggcctctggtatctgccctgtggcctttctgagctgtggctctgtaattttcagttttgtttctggggagggcccgggcggtggggggggggacttgatgtgtgtccagtggatgctgcccatacctgtcctggttctggcagaccctgcaggtccagaaacccctcctgcctggggttttgagttcatcggtttctgaggtccagggcttttacagaggaaaccaggcttagctgggctgggctgagggaaatcctgcttcctattctaggtggcccagcgtggcagaaccctagcaaggaaagttgggtgctcctgtgtcctagacgggcaagcatcctgagctaagaggttctgctcaccttccaggaccgtccctagcacttgatgtttcaaatcctctttcagccaacttccctaaacaaatggaactgagggaaaggacccagagagcaaaggcttgtatagcttgctggtggggtgggagccagcagctgcgaggaggagggggaggagaaaaaggaggagggggcggcaactagagggaggttagcttttagcctcggagtcgggaattagcagtccatccatacagggtacatctcgttaacaaggggccagccacatggcggctagagagcaattcccacccttaaactcaaaggccctgctcaggattactgatttcctggggcagggtgtagggacagtgaggaccatccatctcctggtgactgccagccttttctggcctgagtgcacatagctggctcactgctgtccccctgtggccatcgtgggtgtctgtcaccctcttgctaccttggacagtctggggctggatggagaccagactcctggtttgagaagctgggggaggatgcctggctcacctgcaggcttgcaaccttgactactttctgggcaggtacctcatttgaaaccccggttgggggtacggtttcagcggagctgccttgtattggggtggggtgggggagagcagccagcttcttaaaaaaaaaaaaaaaagcaaaacaggtggtagctcatagtggtcacccacaaatttataggatggcctgcctagttctcaccaaacaggtgactgaacttggccttctagataccctagggagaaaggtgcgacaagatttggaggaagagcctggtgttgttacctggggaacctggcccgcaggcagcgcggccaggtgcgagctgctcatttacatgttgtcccctccccacccccccaagccagtaatccaggtgggaaaggggttggaccagcccgggaggtttttcattttgtttttacggctcgaggccagttgtttctcctgacacctccctgtcccccctcccccctcccgcgtgcgattcccgacgggtaaaggcgcctctccccgcccccactcctggggagcccggcgcatcctcctggtctccagcgtcgtaaacttgcggaggccacgctgccccgggcgacgcgaactaacgcgtggaccaaaggccgcgcagcgcgtgtgtggggccagggacccggtggccgcaggtaggagcagcaactccgccctccctcgcccgcccgtttcccttgtcgtttgtggtcggccaggggcttgtgcaagactggcccggcgtgcgcccccgccccgcggcatcggcggcttctgctggcgcgggccccgagcgctgcccgccgccggcgtcatcgggaacagatggacggggggtgctggcgcccgcgctcgctcccggcgctgtcccggctggcgcgggagggaggaaggcgggggaggcagcgcgcgcctgcggagcactgcgcgggcatgtcccggggcaggtttggggctggcaccgcggtggaaagttgagacccgcagcggcgctgaggttccccccccaacccccccggtgcggtggcctccgggcttgaaagtctgaaagtggaggatcattaagagagctgtgtagaaaggccgggcgggggagaccccgggacctcgcgacgaccttgccacctcgatggctgctctctgcgcgctgggtccggccgagggtccccggctgcctggctcgcgctgtaacctcgcgcttcccgggtggcgggaagggggtgtttctagggatcggtcgcgttgtgggcggggacgctggggcccacagtccctctccgcgccgcctgtgggtgccgaggaatttcaggacgctccctgagtcatccccgtgaagtgcctgggtgaggtagggtgggtgggggtgccaagagtgggaaggcggtgcgctggggccggtggcgcggtgggttgtgccagtttctggaggcggcggcctcgcctctgaccgcaaccccagctacttaatgatgcccctggcgcagcggcgcctccgtggacttctcgaacatgggctctttaaagaactagagcccccgccgtttggccttctcaaaaattccttaaagcgagatggagactttgcaaaactttgggacagaggctcgtggcccgagctcttaacattaagtcctttaaagttgtggtaatagatcaggcatcttggagatcgagagaggccaacggcctatattgtgtggtcccctccactcagcacaaggaaaggcctatccctcccctctcttagtgggtggccaggtgccaggcactgttccaggcgcttggggaggcggctatgaggctcggatatggcaggcgtgttgtaagccactcctccctactcttggagatgagtggcccgcgaggcctctgagagatccccctggactgtccggacagccagggtcgccaggagcgcggggggcggcacctacccggcgggttgtgaccgcgctgggtgctccgggcggtctgtcggtgcgcgcgcgtgcgcttgcggctgaaacccgacacctcccgccggctgaggtcagggcgccgggagcgagccggggccggggagtgggcggcgttgcgcttgggtgtgtcctcagcggcgacagcagcaggtgtttcttggcccaggccccggaagctccacctccccgagcggcggagccgccgccgcacagccccgggtgagataagcagttcagacaaacccgggcgacggtggctccggcatgtgtcaggagcggtggagcagcggggccctggcatgaaaggtgagcgcgcgggtgggggatggtggcgggggttccctcgttcttcctctccccaagtttgtgggctcgggaggggcgccaacggccggtgccaggtcccgcgggtgtgagggacgagaagcgcggggcgcgcggccgacctgaagccacactcgcggctgcgcgcgcgcgcgctgggctcagccggctctgctgccgcggaagtgcgcggggaagtgcgcgggggcggctccggggctcggggttgtagcaaaactttggatggggcgggggcgcccaggcaggtggttggatgggggggnnnnnnnnnnnnnnnnnnnnnnnnnnnnnnnnnnnnnntgctttacctggggtggcagtccaaggggcctccgaaccccccgcccagcccttcccgctccgcctggatgcgcctccccgccccccgcggccgcgctgacggcgagtggcccgcccgagtggagccgattcaattatattgcagcaccagagacacctcgtcgcccgccgcctctccggcaggctaattaaattcccttcttggaggcggagcgggagctgggctgccctccccgctgcccgcctctccgagcgccgggaggtggcgggggccgaataggactgcgaggagcaggcttggggccgcaggtctgggcatcggagccgggagcgagcaaggggcgcccccgcgcacctgccacccgtggtgggggtgccagctcgagttgggtcggtttggtgcaaaccagcctttgtcttccatgcatttaaagcactctaaacccttactagacccctgcggtgccttatctgtcgcggttggggcccacacaggttggggtttgaaaacaagcgagaccaccaaatggaaggggggaaaaaaacaaaccaaaatacaagatccttttgtaaagaggaccggaacaaaaggcgcagcctcgctctaggagggagcatcgggcctaagccgattcccagcactgggggacaaagaggcaggaggtcttggctggccgcttggcagtgtctcagtctgagactggtttaccccctcttcccgaggaagacaaggcccccctggcgagcagccttccctgggcgtccgtgttacttaagcttggctacttaagtgttgcttagcctgtgtttacagccgcccccacccgcaggcggggaacctgaggcgcaggctgtgtctgactcagccactcagtcgccccgccacaggtgaggggggccggggcacaggctccgactggcagcgtgtgtcatctgctatgctgggtgtcacgccccaccgggtggaccggaacagggttgctggcagcctccctcgatggggctcgctgtgccgaagccgcttgctcaacacttctcacagccaccgggtcacgcctgaccacctcctggggtgtgtgtgtgtgtgtgtgtgtgtgtgtgtgtgtgtgtgtgtgcgccttgatggcttggtacaaggttggcttttgtcgcctggtttggcagctggagcggaggaggcttggggggagggggcgctggtgagcagccagccagagacccggggtcagccacgccttcggaaaggaggtgggaggcctgtcctggctttgggctctgttgtgcctgccttagggcaggttccgaaccgggaaggcagagaggccagatcaggccctgacctgttgggggcagctagtaggattctgaccagttacggttgaaaagggggtgtatatagttagttaacattttaaaattactaggaatcaggccttgtcaggcccccattaagctaaccttggggctggcctggggcgattctgatgcctccaggtaggtttttaatggggtgggggtggtgggaagcttccaaaacagcctgaccctttggaagcctctggttgctcttggctaagctgtccctctggcaggcaggcaggcggcctctggctgtgagtaacttaacttccctgtctctggaggaagttggaagctgcagatctcaaagggctgtgcggtttgcagaaaggcagccacctcagggccctgcgcctctagccagaggaagggggaggagaggtctgcaccactttgtggtggaccctgggcctgcaccttcccagccaggccctcgcccaagcccgccagagtccttccccagctggccttgacccttcaggcaggtgtggtccatttccccggctatgaaggaggtctagcctcagctccctgctgctggtctcctcctcttcctagagacgcaatgagtaatagccagctgccgctttttccccccttgcccccaggaacccgcaggggcttgtggagtgagccagcagggccggtttttcctggctccatctgcagccttggaatgcccagcctgggttactccaaagcctggtggggttggataggagccttctgggggggggggcacgttaattacccgtgttgtggcaacagccacaaaccctctatgaggcccaacccccacccctttccctctctccctctcctgggatcttagggcaagagagcatgtttaacctgcagagaactacgtttgaggtgacatttcagccccgtggctgtgcggcagacctgccgagtcactttaatttctgcccccatggagtctcagatctccgagtcctggccaaatgcagcccgccagtactgctggcttcacttcccactatggcctttctctccacccccccccccccacaaggcacacaggccacagcctaggaggtgacgtttctgagtgttcctgtcaatgagaatttatcgagtgcctcctgaacccggcctcgcactcactgctgggaggtgtacagacagatgaaacgagagagcatccaacgtgctgccaatgtgcgctccggaggccttttaatctggcctctgcagagcatctccccaccagctccttacactccctcatgctctccaccccagccagataaagctacttgagcagtccctttctggcaaagtccgtgtccttgtacaggttgccctgggtctggtgggctccaggcacacccgctcttctcccctcggtgcctgtctctctgtgcccaccttttagaggccaggagagtgacagctagcctcagggagactaggcctgaagggataactgtagtaacagggacatcttgaggacaccagagtctgttctcagtcaccatgaaaaatgggggaaaagggtttggctgttagggattctgaggaaagagtcatcattaactggagtacgggatgtgtggaaaaagggggggtgtattctggtttctgaggatcatcattgactacagtttaggaaaaaagcacctggtatccatgtcatgcctccattcagatgaacccccatctctgggatgggacctagcatctgtattgttatttactgttttgttggggttttgtttgtttgttttttaaaatttattttgcccagtgtagtggtataggcttcttaattccagcagtcaggaggcagaggcagaggcaggtggatctcttgagttccaagatagctggggctacagaaagaaaaaaaaggggggggggtcggtgatgctagagagatggctcagtggttaagagcactgactgctcttccagaggtcctgagttcaattcccagcaaccacatgggggctcacaagatctgatgccctcttctggtgtgcctgaagacagctacatacagtgtactcatatacatagaataaataattcttaaaaaagaagctgagcagtggtggcacacgcctttaatcccagcacttgggagacagaggcaggcggatttctgagtttgaggtcagcctggtctacagagtgagttccaggacagccagagctacacagagaaaccctgtctcgaaaaaacaaaaaagaaagaaaaaaagaaaaaaaggatttgtatttatgtgtatgtgtgaatgccttcatgtttgtatcatgtgtgtacggtgcccacagaggtcagaagaggccattggattcccctgaaactggaaatgtagatggttcggagccaccatgaacgccctgcccatccagtcattctccctgagagctggaagtgcttggaactgctgagctatctccagcctggttatgggttttttgtttttgtttttgttttgagacattcttgctctgttgttctagtcaagcctgaaaaactttatagatagactggcctgatctcaaactctcccggtctttgccagcaagggctggggttaaaggtgcgctgctgttagaaaggcatgcatcacacctggagtaacagacaactttttgtgaggcgctcagcgttgtagcctggactgatcttgatctgtgtcgtcttgtgataaggtcttctatccaacggctggcctcgagtatctgagggtgacctcggtcttctggttctcctgcctagactcctaagagctgggacaacagcatgagccaacacctttatgcagcagagaagagagcagtgccttctacttgctaggcagtgattgtaccggctagtcttgaactatttttggctttgtgtttttggcttgtttgttttgggttgggtgggtttttttttgttgttgttggttttttttttttgttgttgttgttggtttgttttttcttctcccattaagacggacttctctaagtagctatggttgtctggaactctctctgtagaccaggctgcccttgaactcacagacatctgcctgcctcccaagtgctgggatctaaggcgtgcatcagcacagccgcacagccgggctggtcttgaactcttgatcagtcccacccttggctttggggcttctgcactgttttacacccttggtcctcgtactggaacctcctccccctagggataatgactgggtttgtgctggcctaagtatgggccagaacccttcgctgttgctctgtggctcattccttaagttattcttagtgggagttttggaggtgctgggtcagaggggtggggagagatggagctggctacagatggctgtgagatggacgctcggaggtcctgctttgagagaagttcaaatagtaatgtgtgtgccccagacagtgggctgaggccaacagtgatagaagggctaacacatccgggtgtttgtgtgtgtgtgtgtgtgtgtgtgtgtgtgtgtgtgtgtgtgtgtgtgtgtgtacgtgtgtgtactggctgctctgcatctcccagccagtgtgtttacagcctgggttgtgggcctcagtggcggcctctgacctagggcaggtggcaagcgcatgagtgtctgaagggggtccctggtacccacaagctccgtaaagggtgatggtgtccctgtaatttatttcaacacagagccaggtcctcatggtgagcagcaaggggactcttttccaggtataaattagcctgccgtgtggagttactcagctgttctggagggtcacctggctggggtcgccaaaaccaactcagacgcctctgtacaccttccctcccccaacctcccgctcccttggaaaccgtgggcttacacttgggagccactccagcatgcactggccccttgtctctgcccctctgcactcacaccaccggtgggcctgcggctgcaagcagccataaaagggatcgatctgtacggcttttggtcagagctgtattgatgttggacaggttaagccgtcccaaaggaaaatccatgtgtcgagctcacaaacaggctcacgaggggcgggggaggggcaggctggggctgcaggtgctgctttcaactaatcctgggcttgtcccttttacggggatgggggtggggggagaaaagagggggggtgttggggggnnnnnnnnnnnnnnnnnnnnnnnnnnnnnnnnnnnnnnnnnnnnnnnnnnnnnnnnnnnnnnnnnnnnnnnnnnnnnngagaaaagaggggggtgttggggggtcaggcccctgacagtatcttgccatacatatttggggcaggtgacttcctaaggatctcccagggcaagcggagcaccccggatccaggcagtttctggccagatggggataacctgagtctttgcatacagatgggctctggcctctcccaccaggcttcctgcttgtggtcagacattggacccatggggcagtatgccaggcttggagaaaagccagacaccaagttattttctgtcctgacttcagatctctccccaagggacaggttgctggtgtggaatgaagggcctgtgtaaacagagtggatctttcccagtcgctgctggtgtgtgcctgtcttttgtttttgacagatttcttttttgcactcagcgcacggtgtttttctcatttgtgtgagagcagggggggcccccatggtagcaggtgcatctccaggtgcggaaacctcagggcaaacagttaggctaacccctttgcccctgtcttctgccacctgtttggtggcaaagtatggcttcctcacgccaccatggctgagaatatggtcctagcatccaccttccagtcccatgtagccactagcctctgtgctgctctcctgaatgtccctgatgatccccgacctcccctgggttggggaggcgtatgctgtaattgttttccatccaggtgacccttcctcagcttcttatttccctgagtgtgtctggtgagcagatatatatatgtgtgtgtgtgtgtatacacacacacacacacacacacacacgtacatatacatacatatatatgagtcagtagccatgccttagtcctggagcctcagacagaccttgtcatttaggcaccgggtgtggcccttaactaaagaacagctaaggtttcactagttgctcgtaagcctccaagttcaaggtgctgtgcagaagtccctgacttctgatgtctcaacttactctttgaactttatgacagaaagcagtgcacgctgggtagaaagcacacttcagcttttctctctgtgtgtgtgtgtgtgtgtgtgagagagagagagagagagagagagagagagagagagtgtgtgtgtgtgtgtgtgtgtgtgtgtgtgtgtgtagtgtgggcgtggaaactccagctttgggagttggggtggatgtcacagacctcttatctatcactggccctttggggttttaatttttctttaaagagttatttattttcattttatacgtacaagtactttgccaccatgcatatatgtgtgccatgagcctgtggcggcctctgaggctagaagaaagtgttgaattccctagactagagggttgtgagccaccaactaggtgctggcaacccgatccaggtcctctgcgagaataataactcttaaccacggagccatttccccagccccaccccctttattcattgctatgatctgtagcccaggctagacaaccatagccaactgactgggaagcagtggtgaccttgaactttgaacatcaactaattcattatgaattgaggcctttctctagggtgctactctttggggtgcccctctgtcctggtgccaggcagcagcaatgtccacagttacctgctggttgcaagggaactttgccagtcacaaccatgttgagttggttgggttgtgaatgctcttttttttttttttttaagccctggctgtcctggaacttgatgagactggccttgaacccacacaagagatccacctgcctctgtctctgctgctgaggttaaaggtgtctgccaccatgctctgctgtttctagccagaacccatgaagtaggctggagaattgtgggaaatgaactgaggcattctgggaggttgactggaagtttgatggcctttgtactgtatacatcgagccttctaccagcatggctgttgtcaagtgtgactcctttgttggccagaatggagaagggcatatggaggtgtgagccctttaagtcttaaagacaggttaagcaaccctgagctgagaccaccctaaccgctccaaaatcataaccggttgtaaacaccgatgtcgcttcagagtagaaaactctataccgcggaactgtttcgtccctcaaattattaaaattaccatgcagggccggggttatggctgagaaattgttactgatctggtatgtgggaggccctggggtcacttcaggcttgggactggagaaaccatgcttactgctctccgagggggcaaaagtaaagttcccaaaacccatggtggggcctctccttgccccaccccagcccccagggtgagttagggagccagtgccctccctattctggctgcctcaggcacctgtgcatgtccacacatataaataaacagtaagtacattcacttgaggccatgtgtcttcctgtgtagaaagcagctttgggtcttgaatgtagacctgagtttcttccccagaacaccaaggtagcttaccgtgaccgtgcagctattccaactttgaaaggtcactccccaagctgctgttcccatgcatttcaagtcaggattattgcagcctgcagtgccacagaaaggcatggtgggacgggtgccacctgctcctctgctggctctcacctgccccctgggtggagatgtggatggggggaacttggtcctgtgcttagccagccttggctatgaggattgtctgcccacaggggagtctgcgctaggccggctcccagggccttcgttaggtctgctgcagtgtagggagggtcaagtctgggttgtactctgagcctgcttggctagaggttcccagttggaatcctgcagaatgtgggtatgcttgagttgccagggtgacttgggtataggtggttggtcactcaggggcacctaacacatgcaccctggagacggtgacatgtttgcccaggtttgtagctgtgtgtggaggaagtttttctctgatggaggaggccatcatggcctaagggtcccccacccccaccccccggttgagaattttatggtgtctgggcttggcatgttgggttttgaaggtggtagaccagtctgatattgaggcacggtactagagctttctttccctcaatccctgagcgactttgtccccatgcatggtactagggaggggcattagttaggagtggctgctcaaagtaactttgttgcacaagtcattttacatccaagccccaaggacccagctgccactttaaacatctgggggagtggagctttgtgtgtaggcaagcaggctgttcctgccatacatcctagtccccaaaggggtctttttacatttttctgtcacgttcctttacttgtgtgtacgtcactgtgggcatgtgaaagtcgggggacaacctgtaggaagttgggtctccttcagacccaaactgttggccttggtggtcaggaccttttctgcgggccctggggacaagccacttgcctgcttatactctgggccaaatcctgaatcggatttgagtggcgggcgagttcgctacaatctgagagggaccctcctggatgggccctacttcctcttgagtcagcaacgtggagcctgagagtcccagcgggacccagtgtttcagctcccgtggactgcgagcactgagcaggctacttgtgaggccagagctggggagcgtggccacctgagacctagaggccagcactgggacccctgacttggggatcggtgggttttgtaactcagcagcttggaagaatctcaaccgaaattccatactaaggtgatccttctgggtctcactcaaacaacttaaacgtgactttaggccagagacactcagcccactatgtcctgcgcagccagaagaaacagagcgtggttgtctcttctcccacgcttggcacctggaacctgagggtgaccctcaaaagtggccagcctgtgttggagctgtcactggctgggaccaaggggcttgtatcaaaccgtggtttccattagggcaaggctagaggaaaacagcctggccttgctgtccccagccctccttccggaatctacctgtgacctcctcctatagcacctgctgataatgctggtatgtggctggtgtgtgccctggggagaggtttgtgttgtaacacttctgtccccacttcccaagtagccccctgggtctgctgagcccccagccaaaacaggaaatgggagtggagggcctgtcttggtggagcctgagaatccctggggaactgggcggcacatgtgcattgctgccttccaggtgaccactcagggcctggcctcgacctgctggcccctggcctgcatcccatggagactcggaggcacgtaacctcagtcctggacagcttgagtgtttgtttttggggacttggggaggaggccagcggccggtgctcaaagggctctttgtgaccgatgaagcccaaaggtgccatgggccactcggggctcactggggtgtacagacactgctgctgggtgatgttgcctgcctctgtcatcctgtcgtcctcggccctccgtatcaggcatggtgacagtggtgcgcggtgggctccccaggagctgactcagtggacattacagagatgacagactctgagcctagatgaggtgtggctcttgccagccttggtcaccctctgggtaaaacacccgaaccggactgggtaatggcagagtctctatgtccgggaggcaggttgggccagactgagcagtcaggctgaggcgaggacaccctgaggtccctagtccctgtccccgtccccagtgttagtaagcagctgacaaaggagcccagggaagggaaggatcttgcctgtctcacctgcctgtcactgtggttggtgtgtggggtctgctgatgtgaagggtgccatgcctgtgtgtaacgttatggttatagaagccctgtgcacacctctggctccaagccagtcccacctcctgctgctgtcaggatcaccattggggatggtgccgggctctggactgtcaaccctcggcggtgctgaccactggcttcccgacctcagggaccctttcctccggtgggttttgccgagctggtgtggggtggctgtgtagcctccttcgtctgcccacgccaggcttctcacgaagcgaagcacagcgcagcagccacttagaataatcgcgtcaaatgtcgctgccatctgttgccaggctccatccctgctgccgcctgggaacctctgagactcctgctctgttgctttgtacctagtcaggtgacttcctaggaggcctgtctaacatctacagccacagagcctcatggctctttcctcctttcctcccctgctccctccctccctccgtcctccgccatgcctaagtgagtgctttactgttgagctcatcctcagccgcctttttactattttttttattttatttattactatatgtgaagtacactgtggctgtcttcagacacaccagaagagggcggcagatctcattacagatggttgtgagccaccatgtggttgctgggatttgaactctggacctctggaagagcagtcagcgctcttaaccgctgagccatctctccagccccatgactacttgtttttaagatgagttttcaccaagtctaggtcggcattaaacccgtggtacccctgcctctgcaccctgagttcgggcgccatccctcactgttacccctttctttgcaccttttcgatccaccacgtgtgggtctcctgtcagtactcccatttttttttttcagaacactgagacagcagggcctttgacagcctaggggtggacagtgaaaggcttggagttaccaaaaggtccccattctctgccctcccatggctgcagggaaccccagaggctgcttatacatccatggcattcatgctgtgggcagcccctcctgtccttgtccacagtgcagaggtgggtaacctctcccatctccctccctcattctgcctggctgcctcattcctcccctgacccacagatcagagcccctgtcatacccaggccacccccactcgcctgctgctttctccgctttcacggtcttgggtcaggagtcaccatctgctctgctctgctctgctctcccgctctgtcgcctcgtgcaggggttcctgggggaactgaccttgggagcagcggcagaggggcaggatttagcggcctgcggggtacactcaccgttgaacatcagcaggcctccctgcccccgccccggagaagctgcctcacatgggtgcgctcagaacaagccggcggcggcggcggcacacataataatgaatttattatgaagccgtccaggctctggggatcacgtgggcaccccacactactgcagccgccaggtccctgcagcagggtgaccccagccttgttagagctgcaaaagcatcaccctctggggcgcggggatcacgggggtgggggtgggggcgtggagcccgggccgacccagtctctgtctgttcacaaacatttcagtgtgcggtaatgaaaaatgacgaaggggcagatagagcatccaggtccacactgcctgagagccttgctctgctgggcacagcttccctgggtgtaattaccccagggtgaggggctgctggcggaggagggagggacggattggtgcttgaaccgggccttcagaaaattcatctcagctattagctggtaattacagagcagaaggagcaagcctgaggttctggtgccgggaggagctgggatgaaagggacggtaattacggcctcaacgggagggaggctggnnnnnnnnnnnnnnnnnnnnnnnnnnnnnnnnnnnnnnnnnnnnnnnnnnnnnnnnnnnnnnnnnnnnnnnnnnnnnnnnnnnnnnnnnnnnnnnnnnnnnnnnnnnnnnnnnnnnnnnnnnnnnnnnnnnnnnnnnnnnnnnnnnnnnnnnnnnnnnnnnnnnnnnnnnnnnnnnnnnnnnnnncccccatcccccaccccgtgaaccccttctgggtcaactgtgcaggaccagagcgaggtgagttgaggagtatcatctgcctggtgctctggggtctccttccttggcactgatgatattcctgggcatgttaggaccctaagtgggggaatcgggcaggatgcaccaaggcagccaggctgtccccagctattttgtggagatagtagcttctgacagaaacccgagctctggactctgggtctagagaggggagagctgcggccggccagcttgagagtgaacgtttggtcgaggcagcaggaaggagcctgtgtagagtgcccaagagtccacttagatttaggctgactttctcaccgagctgctcgcctggagaacatggactgcatggactgcaggcagccccgggcctcatccatcacaggcccttgctccacagagcttattcccaactgtttaggataatgaattcgcaggagccagtcctatagatgacgacggctgggaacagagaagttaataaataccccctaatgaggacagggagagcaggcatcccgtgcccacctctctcctttccgctgccccccccctgcctgccacacctgagcctctacggacaccggtacctgcctactgaggtggtttcttctcgggatgccaggcacagaatagacactatacctagtggccctaggccctgtgagtgaagaggactcttcagctccccccaaaatttggcagtgtgtcctcctctttggtacccggggccagttccccacccctccccccaccagccccatgtgcgcatgtgtgaggaacagtgctaattttagactccccctaatgaagccgctcatttggaattctattttaagggagctgacatcagagcagcttcccaggctgggaacatactgatatctccagaacctaggcttggggtcccccacccccaagggtagggggccaagggcagccatgccctgggcatgagactgctggaggccctaggggtggatcggtcccctgctctctgacagttggagtcctgtttgggctacccacaggagcatggtgatagcatgtggtacagggaggtcctacccatcacaaatcctgttatctgccatcctgccaagtctggtgggtccagcatatccgcttacacccattggcatcttgaagtgccccctccccagtggcacggtcctctcctcagatttgggggatgggcctacagctgtaccgcgagctgctgcggctcccagcatctccatctgccatgctgcccacctggtgcaggtggttgggtgagacactgaaccttcaaccctcccgctggatctgaggcagcttgcttcacacaggacatagctcttcccccagagtggtcccggccctgctcccaacccacccttgtgctgagcctacccactcatatctgtggaatgagtccaaggacaccatcccttgtgatggctcctgagatggctttgcactgtcagcggcagaggctgggggtcaaatatgttggcagagtgtttcttggcttctgatgggttgaggtgaaccactcattccagattctgtgcaatatgcaatatattaaactgccccaagcttggtgtagggagtagaatagcgtctcctagtgcctggagtctctgtgggtccacgacagaaaaggcttagctggtctggtccagctcagattgctgctccagggactggaaggcaagaaggggttcccacccccacctccccaagctgaaaacaatgtatttgttggaagtgagttgtcagaaccatttacacacaggcctttctctgtgtcttgcaggaatgagtgacaagacttgggggacatgttttaaatcaccggagtcgtgtagttctgagtgatgaggcgtagcagggttcaggctgagtgcggggatgtgagaacattaccactcagctgtgatagcaggccagcctcggcacacctggcctcagtttcaccatctgcactccttgagatccaaggatgactgagatgctggccacaaagaagggggtggtgtagacagtgccttagtggcttggctatgttccgaaccttcctgatcctgcgaccctttactacagttcctcatgctgtggtgacttccagtcctaaagagtcaaagatatcggggcccacaggttgagaaccccagtagcttagagagccaccctgattggatcttaggagctgtccccaggatgtcatggctacctgatccccattacaaagagggcctggtatggacacaggtcagcctccaggctcagcagcctgctgcccccgggacatgacccatgcaccacaggacctggccaccactggaagccagccagcctgcttgctctgggcatctttgtagcccttgctggtgtgcccggcctcagtgacctctttcttgcgcgcttactttgggggcacccacgtggaggaagcgggggtgagcggaagtgagagattgttctgcggtgcggtctctgtgaaggcgggcctctttcccagatgatgggaagcagtaccaggatggtgcctggaaaagctgaaggagcgagagtgggaggtggctcccgaaaccctttccctctgagggaaagaccagtgcatccaggctacaacgtggtttcaaaggcagatttcattcttccgtgtcttcaggccctgggacctagggaaggacttcaccagggcctgcagtgagctgtagccttggccaccatctcctaccacctgggggagattggatatgagcagagtgaggaagagactggccccggcctgagagagagttagttaggcactgggtatgcgttgatcccacagacaggcctcagtttccttctccgtacaatggggcagttgtcgagccggcctcttgacgctgttgaagatgtcaatggtttcgtacccgtgcccgtcagccgctgcttgtgttgtcttctcagttgttccagcccgtgccttgtctctctggggtctggtggggctctgcatatggtgtgtcggggtatcccataggcctggctctggggagccagtccagcattcagcttcaaccggggtgcctttagacccgaggggccagcaggactatggggatgggtccgctgtctgcatcgctggctgtgctccgctctcgcagccccttggctctcgctgcatgccgctgcagtgccctggcactggcgctctgctctctgggtgacactggttcttcttttcctgtttcaggcatgagccatgagcccaagtccccttccatagggatgctttccacggcgaccaggaccaccgccaccgtcaaccccctcaccccctcgccactcaatggcgccctggtgcccaccggtagcccggccaccagcagtacgctgtcggcccaggccgctccatcctccagctttgctgccgcactgcgcaagctcgccaaacaggcagaggagcccagaggtaagaggcaccaggccactcgctcatgggatgccccctgcccactgtgcatctctctggctgctgtggccacaggagacagctgtctgcagcttgtggtactgcacctgcatctcccctcccccaccacatccaggcagagctagcccgggtgtagccgtcaagtgtagctgtcatcatacctcaggccctgacccctgacatctgaccccagctctgcaccctgcttcactgtgccttcctctgtgcctgcctctgccttcctcagcttcagtggctactgtagatgcttattggtggacaagtggacttgccattggggacgccagtgggaccagagattggccttctgaagcctcccaagctgaggacatcatgttgctttgggcaaaggctggctctttctgaattcggtcctgttgacaaaaggttctcttaggtcccctttggatctggctttggacacgtcttgtgtcctgtgatgaccgtgcgggtcaggaatgagtggcacagatgggtcggtttatgtctgaacttgggagctcttcagattctggcaactcctggacttgctgctcagagaggcaggtggccaaagtatggaaactttgtctcaaaggccctggggtcctacagagccatcacttacacttaggcttgcagagagtccgctctggataagtgggcggggatttcctgatatcccacagttctctgccctggtggctggcagaggtgagggtgtgactgggatgggccctgagggtaccagaggagaaaaagtagtgccgtctgcccagtggaagacagctgctgccaaaggaccacacctgagccagcccaccttggttggctgctggccaggttccggtgaccctgaggaagaagttagtctgcccacctatgccatcctgggctctcccattgtcctgcaaaatcctggggccaactggtcgggccgagtaccagaggctgcggtgaatggaaacacggtcgattctgaacaacaggtgcattatccaccgcgcctgtcgcttcttggctgtgacctgggcatctgatgcccaggaactttgtgccacaccgggacaaggagatggggctggccgtgccgctggccgaggcttctctccgccagcctgtctcctgagtcttccccatgtgcagatggggacttggggcttgcgatgcttagtgtctgtggatacagggtagcttggggaccctgggacatcctgacactggtgtccagctgggcctgggccctcgtctgctaccttactggaaactgggtgtcttggcagcgcagcgaagttaaggcccaccccgctagtcttcaggttctcgtctgtgtcgccaggactggtagtgattctctgtcacctcggtttggacctggtgttgctgaggtgacatgttgtacggatactaaagctactgcgcggaggggtcgtgttgtgagaccagggtcccgggagcgcatcctcctgtcccctgagaggacttggacagttggaactaggaatttcaagcacgtggccccggaaggagggagctgctttcttgttcagcgagcaccagtgtggtgcaggggcttggctgtggagagctgtggagagctggattggcctccccggctgtgggttgccagttccagaatacttcattccacaagccatatcttaagttggggggagggggagggctgtttatttgtttttgtttttttgttttttttctgagagggtttctctgtgtagccctggctgtcctggatttcacttcgtagaccaggctggcctcaccatcagagatctgcctgcctcttgctcccccatcccccgtcccccccctcagtcccgggattaaaggcgtgtgccactaccacccgggttcaatattttcttgagatcaggtgtcttgcagcccaggttagcctgggactgtgtgtagctgagggtgaccttcaatttctggttactgggtgatggacgtacccaactcacagagtgccggggagcaaacccagggccttgcgcgtgcatgcaagtgccacccctgagccggataagccattcccactcagctttgattacacatgcagcttttagcacacatcctctctagcaatccagaacatgttttgtatcccccgcagggttacccttttctggcctccccccccccccccatgattccctgtcttgttgctccatcctttgaccccactgtgcaagccatgctagtcacatggggaggcaggtgggacaggcaccctctctgggcccagcacctacctggtatctagctgtggctcttcattccctgactctccagtctgtctgtgtcccaggcaattccaggctcatgttcttaggcccccacaggacaggcatctgagctgccgcgcctgagagcccgtggtggctctcagcccaccccagcaggtaagaaggctctggagtgaaggtggggtgtcctccagaactgctgctgtcaccccgcaggggcctcgctctgtgtcccctccgtccctgaggctctgccccgtgcccacccttcctggaaacagttgtatttttagctatctgactgggctcgcctaggcttctgctgccgacgtctctcttcatggtgtctcaggggtgcagttgaaaaattcaatccagacaacgcaatcagcatgccgcctcatttgctctgccccctccccgccagagaaaggcagagggggagggaagagaagctagcccctcccaagacctctgtgggccccacaggggatatcccaggctgtgggccccatcccatgtggtagtcgtagttaaggcaaggccaaggttttgccagaagacgctgggattcaccgggccaggcccagtacacatcctggcacttttaatcacttgctgtgccctggtgtgttggcttaacagtctgagcctcagcttttgcccagggccagcaggccaccactggcagtctgttgatctagtgatagcatacagaacggaacacagatcacgtaattaagtgcggcccccataactgccttcccaagtgctgtcgctggggcttccccaattgtccccaccgccattttctaatcctgttgtccctgtttatgccccaccccaccccaactccctaaacttggcaacacccagggtcagccattgtgggtccccactgctgtggtcccagcctggccaagcctaggtagctgcttggcccactgtggcctgccagtggtgcagtgggtgggcttccaaggaggatggagggcgggggggagcaccctgacttctaccctggtttctggaaggagcattgggctgtggatccagcccagcccccaggctggacccctgggtctgtcctgccctggcttcttaagttactactattactgtggactctgaataatgtccccagggtgctcagctgtcctgaagctgcctccatccacgtgtggctggcaacattgtagctccagtctttgtagaggctaggatccagtctttcctccaagtagcgctgcccctccccccagaggcccttaagcctctttaagattccatctttccctgtgctgggagcccagcttggcgggtgttgagcactcctaccagccctgtctatcatgctgccctggtggggggtgggggggacgggggtgtttctgtctttctgtgacattagcccagctgccttgaaggcaagggtcccccagattgctcagtgggcttagttaagttactttgagtaaaggggtactgggagcttctgggatcttacacccagagccacgtctcaagccaccaccagcctggccccatctgaggttctcagagcagagaggctctttggcctctgtgagagcaagctgtaagagtccccgccacagcccccacctgtgcgagatgaagctgggtgctgctgccaggcagggcccaagctgtgtggcaatctgctcatctcccacggggccctggtgccgtctgccgaggggggtgggggtgcgacggtagcccacatgtccctggctgatcggtagaagacccacacagcaccagagctgtgtgtaccctcagttccagtacacccggggccttgggccccctgtttcccaggaagcacatgggggaagagccgccttatacctggctattcgccactttgtcacctgtggggacaagggtagcttagagcttttaagcttctgattagacatccctagtgctctgaactttccggaaatctttgccacctgccggccctgtaaccaaggggcgtcaagttaccatgggtggtggatgaaacccacccagcccctgagaggcagaggctggggaccatccctctgggtttgagtccaagcagcccccccccccccccgcctgcatgtctgctacagggtgggctgggtgcaggctgaaacacaccctgggttcatctccttggaaatctgcctctttcaaagaaaacaaccaaacaaatggcctgcctgcctgcctgcctgcctgcctgtcagtctacagctggcaaggtggaggcatcttcgcggggtgtctggagccccatctgcctgtgtctcaggtgtgagcagcggggctagctattgtggaggagagagaccaggatggggagggagaaccacccagagtccagagccacagctggccctgaggtgacaggaggtgagcagggtgtatggacatcaggatgatggtccttccttctccacccctcttaccacctctccttccttcctctttctatcccccatcccacgcccacccccacacaatcttcatagtgtcctaacacggcagtggcagtgggacagagctcagctccaagggatcctcactggctcctgccagcctcagttctcaggactggtgctgtggttggtcacggcacgttctttgcccaacaggtgttactggaaagttagtttctctcaagtcacagccccttcctgactgctgactggggtttaacggcaccgccaccagccccgttccctcgcggatggacactgaggccacccagcctccagacctgtgacatgcgtgaagacacactggcagagcaggagaagagtcctgtccggcagcatatggccaccccgtggttcagtttcactgtctcctcaaagctgcatatcatggcggatacctctgctggaacttcctgctgcacgcctggctatttgtgctacactctgggggctccagagcacttccctgcctggtgtttgtcactgtgcccttggtcctaggtccccttcgctgccagttcctcatggtgcccgggcagtggttgggatgtagtgttggttgggtttatttcttgtttcttaacacccacccccacaactaactggtgggagtcgcttgagtctgcagggacaagagggacagccctgagatgtgggaccacttctcccagcagggatgtcagataagagtacctgctgtgcagagatccagacctgagttcagatctctagaacctgtgtgggggaggcagaggtggaaggaccaccccccccccccttgctaagctggtcacaccagtcaagctccgggttcagtgagagagtcagtaaatacagggagagccgttaaggaaagcacctgaaatcatcttgcgtgctcgaactgacatgcacatattcaactgacatattcagggaaaggggccattgcaggtgttgttcagcagttcatatctgcaccagctggctaaggctgcccaagctcttgcctttgggggtcttggctcttaataacacggactgccccacagggccttggcctcatctgtggggtcagtcagcaaaggtgatgcaggcacccctctgcctcttcatctgcagcccggccctggctctctgacccattcccaccactctggctgaatagcttcagttaattacagcgatggcggacctgcctgctccggcagcacagctagagagaaagagagagcacagggctgggagccaggcgccagcctcgctaattggcagcgccttgtgaggtattgatcccagggctctcgctggtgagcactggcctctgccttccacctccgacgggattaggctgctaattgtccatggccagcctcatcctctctgagccagccccacactagagcctgcctgccccatactcgtcccttgctgggccaggctattgctagcatgggaaggggcagagaggggccagctgagctggctgccttgggactgccctgtcccttatacagacggcgggggggggggtacagaggagctaggatggtccctgaggcaccatctgatttcgccccctgaggagggtcatttggctacctatctcagcagggcccagagccctcaatgatggtccagcgcctgcagtcacctggatagttagtgtgtgagacggccactgccgtagctggcggtggtcttctgtgtgtggaagtgttaactgtttttgctcccgtgtgaggatagcatgttcctggcccttgtgttcgtgtctgtgcagtgggtgggagctactgttcacagtagctgtcaggtagggccaggcaactgtcccatggctgaagaattgggggaggtgacttgtccccctcggtgatggtcagcaaccttgaggtatggatggagttctggtttgggagacaccgttcagcagagggggccagggaatgcccagagcctacagatgtcaccctctcaggctgctgggtctcaggggcggaacaggcacggctgcaggttataaaagtgttccgcaggttgatggtggtgatcaagcgagaaggggggggggctggctctgctgaggtggctctgtcctttcatcccagggttcagatggcgagggcaggaggattgccatgagtccagaccaggcagggctccagcttgagatcctatctcaaaagagggggaggggaggaggagttgctagggagatgattcagtcagtaaaatgcttgagggacctgagtttgagccctagaacatacctgtttgaaggcaggcatgctatcttccactcccaatctcatgccaaggaagtatggacacacaaagccctaggggacctccaccccccaccccccgccattctgtctagcctgacttgagctccaggctgtggagagagcctgtcttagaaacagtaagtagtgtcccgaggactgcacccaaggttgttgtctggcctctgccacatgtgtacccgcacacacagatttccgcgtacacagagatcgatagcgtattagacatgagcatcataccgtggctcccctgggaaggaccgcgcagcacacccgaacaggttgctgttttaggcaataggaggattcctaaaaataatgtgaaagtgattgcgtttttgcctggcgtggagacaacctgattgtcagctctgggccagcttgggctgaaaagttgggcccctgcctttctgtccatccatccgtccgtccccccccccccccaggagctatgttctaccctttgaggtactgtctctgagcaaggaggttgcatcccacgctgtgtgcttgactcggctttttctgttccatgtgtcctctcgtgaatgtggctgagggccttgttggggcattcctgtatagaataggcagggctgggactcggtatagcccaaggctgtgggcatgattcacaacagaccgcatggactttctccggggtgtttagttgacacttttggacacatacagtgacgggcattgcaggcctagggtgtggctttctggccccttggctttctcaggtgcacagagggataccctcctactgaatctagggaggtatagaatgccacgccctccctggctcctgaatggtagctcgctcgtgccaaggttcttggtcagtccccaggtctggctgcaccaaccggtagcttgcctccatcagctcccagaagctggcctcccgagccatcgtgtctctgagcctagctgctctcctgtgctttctgactggcaggtgctgggcggtcaccgtgctgggttcacactgcccagccttggggcttgctgctgcccgctacccacttgagactagagagttctcaggctgtaggcagtgggtgtggtgcccattggagacctgagagattcttccctaggctccagccttcagcctgattgctgaggtcaggccctggtagtcatgtgaacaagaggtgtgcttggctggaactgctcggggcactgcgctgtacaattacacaagttacacatgggcctccgcagtcaaagaggccgtgccatgtgtccgcaggtagcatgattgtcccgggaaagagggggctatgttagtgacagagaccatccctcactaccaagttctgttggaaccgacactcccaagaactaagctgcctcactaccgccacctacctgcccctcttcccttttgctgctgggggtggttggcaagggaaacacattgcttctttctggggtcgtgaggctgttctgggtatagtagcattcactcaatatggccgatccaccggaggtacattgacgtggttttaaaagagtgagtgacatctcagattttttaagtgtaaaaatagctctccacctccacgcctgagaggcagtatgacaagggaggccacagaatggctgtgggtccgtccctgcctgcccgctcttgggcctcactccccatgagcattctggaatggcaagacgcgtgggcgcggtgggtggtggtgtgacacacacaggaccctgagctgcttcgttctctttccgcagggtcctcactgagcagcgagtcatctccagtgtcctctccagccaccaaccatagctctccagctagcacgcccaaacgagtgcccatgggccccatcatcgtcccccccgggggtcacagtgtccccagcactcccccagtggtcactattgcccccactaaaaccgtcaatggagtctggagaagcgagagccgccaggtgagtggcgccgcccagaggtgtgggcgtggtgggggtaatggggatggaggcggggtatgtgggggtgttcctgcaggctgttttctgtccacagctctgttgagaacttgagttgggggcgaggttgacctctcaccctggtcctcagactcttctgctaggtgagcttgatacgcacccggtactggaagatgctaggattaaggcaacccttacatcagacttgtgacagagtaccacaaattcatcgttgcttgctttaggaggccagagcctccctaagcctggggagggagggggtcgccaaggccctgcccctttacacagtggtgtcttattgtgtcctctggtggcctggacggcaatcacttctttaggggtctacatacccagaggcaccaggttgagacagacaacaaccatagagtgccttggatctttggctagacaatagctgtgactgctttggaggagtaggggcgggactgtaggctaactctgatggtccctgatgccagccagcaccggggtccttgtgtctgcagtctctagctggccataacctaactgcagtggaggagccagccccagagcttcccctgtactgctgggcctcccggcggcctggcagcctggcgcctagagggggccttgctaattaagaaccgctgtcagctgtggctttcccgggattctccagccccattcccagagggtttgtactgctaggaagtactaattaaaccacagagatggagggggaggggaaggagagcacctctccccgctggggcagggcaggataggcaagagtgtgagtttcatctgcccttcaggtctgattggtgtccccagtaaagtgcttggagcatccatcaggctcctgactgaagcgtgggggccagccttggcccattcctcctgtggctgaagtcacacttaaccctgggaaacctgtctgagcgatcctgtcatcgaatctcagctcagagcagcctagacccaccctgtcctggcttaagagaagtcagagaagttgccaccgccaaccatctcctgtctgtggactcctgccagagcgcagctttgacctcagacaatgagtcagctgataaaaacccccatagagcttcccttccctgggtaaccagcttgcctggtgactggctttgctcctgagagagaagctggtgggagggtcacttcctgttcctgccttgggccccggagcttctgctgactggagcccctggcccaggtccaagacacttcatgtattgtccccttggagaactaggaggttccaagtgcctctgcctcgtgactcctctgcccggagcctgtcactatcctcagaggatccttactgcctcagaaacatttagtaacccggagaagggctctgatggctctgctccagcagttcacgctgtggttaacaagacctgctcgccaccagggagaccgccaccgccaccgccaccgccaccgccaagcacacacacagtggatgatgctcagagctcagcagagagtttaatcctttccaggagggcgggggatgcgctctccctgtagtgtggccatgagtcactaggggcctctggaggcaacatccactggttggaagtcaagggggtgtgtggctccagggtgaccaggcagtggaagccgcgtgagagatgaatgaagaacagtctggaaactaacgggctcatcccacttgaccagctgtggagacctcactctaatcactggagaatgagagttctctccttcccagccgctgcctttcatggatgcagctgtgtcttggagcagctctgcagacatatcttgtctgccacagctgctgccaggagggtgccctggggcagccaccatgccggggctttttctgtccttgtcacccaggcagcaccctgccccacagatggcctggttagccaggttctagtcagagaggccacaggcctgaggagggcagcagtgtgcaaaccccccttccccccacccccccaattggcctgatgaccattttttcttttctcttttttttctcttttttcatctttggggctattttttgttttttgttttttggtttttggttttttttttttttggagacaggatttctctgtgtagcctggctgtcctagaactcactctgtagtgctgggattaaaggcatgtgccaccactgcccagcctgatggccatttttctagtctccttgtttgtcctggtgtgagtgggatatgtgcccccaccccacccgcaccctgccatacacacctatacggtactgtgtgaatgtttctcctgaggagggcaggtcagaggtcatgaacccatgaggaccccacaagggaacagagacagcctgctgctgcacccagggaaggaaacagatgttgctgctcattaaaaattcaatcagcagcctgtctccctcaattaatcgtggctggctgtctgtggggagcaggagggcttgtggtagactctgtgagaatggaggcggggaggtacggtgctaagctgtcctcactctgcacacacagggttaagtggtggtacagccacgacccctcccctcggggcttacatatgctctggtgatgctagctgctgaccctggggataaccacaaggagccggtagaatggctggcaggcctgtatccagagacaatcagtgttactatgctggctaccatgagcctttcagtcacaccatgggttcagccatatcatccagaggacctcgtgtccctagtgagtgccactgtctgccttgtgttgggcttctcctgcagtagtgagggaagggcctcaaagttgtaccaggaggctcctggccctcagtctcccctctgctccgtggctccctgactttgcctctctgccttgccctgaggattcctccctagtcacaggtgacaggcatgcagggctgttgggtctggtttctccaggctgtgtggtgctgctgtgactgtttatacagaaaatcagtccgtgaggcggggtctccccagcccagcccagcccagcccaactcaactgccgcctctcacttcctgcctgaagggagcctctcctggggtctcaaagcctaaatatgtgcaagggtcccccacgtaggtccatatcagctgccagcagtgtccacatagctacgggcactgctggaatctagggagcagctctgtcctgaggtgcaggtccccagggtgtgtgtgtgtcctgactctatgaccaccctgttttgcctataggaggtgggagttcctaccctgcagatgccctcacatgcctcatcttgggattcagcagtctggtgtctaaggcttccctgacattgttgagttccttctagagctgagccagaccctgtagaccttggtccagacctgctcataggaggctttctccctaaataccccttttatgctttctttgattaaaaaaaaaaattagggggaggatgtttctagaatatggctccccaaaacctaactcttcttcccgcaggactctggctcacgaggcagcagcagtggtcgggagcgcctattggtggagccacctctcgcccaggaaaaggctgcgggccccgccatcccctcccacctactcagcaccccgtacccctttggcctttcccccggctcagttgtacaggactcccgcttccaaccactcaagtaagtgccagcctggggtcagggaaggcacaggggtggctccagacagacctgagagtttgcactggcagaggtagatagaatgccattagtctcagtggcctgatctgccctgaggtccttggccccatctgaccttgtggtccagcctttgttgagacagacttatcaggtgtcctaaacacatttaagcccatcctctgggtctggggaacagagagcccctccagcatctctatccactcgtggggaccttgagggacaggcagcttcccatctgtgcagtctgggcttcatgccaggctgtacctcactgagaggcaggacctgagcctggtgagggagtgtggcacattacctctgctccccacttccccctcccacagcctccagcggcctgtgcaccatgtggtgccccccagcacggtgactgaggactacttgagaagcttccggccctaccacactgctgaagacttacgcatgtcctccttgcctccgcttggcctggacccagccaccgccgcagcctactatcaccccagctacctggccccacacccattcccccacccggccttcaggtgaggcgtccccactcacgctgccctgtgtgctaatctgttctcagcaaggcagaacctctcggggcgggcgtttgccagggcttggggtccaggcactcaagggagctatatagctttccccagctcgactgagttgagtcttgatggatggactcagtaccacctgctgatgctccttggttcccacttctcagcatctgcaccccagcagccagtccccactaacagtgtgtggtacctagacagtgtgatggagactccggagtgagagtcaggccatgccctccctcttcctgtagaagctcctggcctcttaccacagcgggtcacaccagaggtctctgcctgcagccagtctgccctcccgctcgctcacccatggtccgggaggtcctaggcgcccatgtggtctgttccttgtggccccagacagtggacatgctctttgcatgcagtctctgcagggctgagcctgagtgagcagtggctcgcccagccgagaggcgccggctcacctgcctgggtcccggcctttctcctgcagtgccagggattcacctgagggcttcgcatctgctaggcaagcttatcctttgtggctcctgcacacaccagtcctgcctctctgtctacaggatggatgactcctattgcctgtcagccttaaggtctccgttctaccccatccccacccctggctccctgcctccactgcatccgtcggcgatgcacctgcatctctccggcgtacggtatcctcctgagctctcccactcgtccctggcggcgctacactcggagcggatgtccagcctcagtgcagagaggtaagctgtgttttcagcagaggtggggtggaggggactgttgagcgttcctgaggtcctcagcggggcctggcttggtggtggcgggatgcggttctttgtgtgtaggtggcaactcttgcatgtggctgctccactttgagctggggcgtggacttgccccccctgcacatccctttagcacgctgccctgttttccctcccaggttgcaaatggacgaggaactgcggcgggagagagagcgagagcgggaacgggaacgggaggccgaccgggagcgggagaaggagcgggagcgggagcagcgggagaaggagcgggagaaggagctggagcgcgagcgggagaaggaacgggagcgcgagctggagcggcagcgggagcagcgggcgagggagaaggagctgctggctgccaaggccttagagcccaccaccttcctgcctgtggccgagctgcacggactccgaggtcacagcacggaggagcggcccaagccctcggagcagctgaccccaacccgagcaggtacctgggctgagctgtgtggagggaatggcctgtgcctgccccagcagtaaggaggtgccatcccaacgctggcgagactgggaggaggtgtgctctgtcaccctgggtggatccaggatcccatgggtgcccccagaacagccaagacgctagggaggggagttgccatcactgcggtagaaccttggttggtctctgccttttgccatggtgatggtgaacaccagagtcacgccactgagatacccccaatctgaccttttgttctgtgtcagagttctaaagccaaggctagcctgggactcaaccgtccctcaaattcatagctatggtcctgtgtcagcccccaaagtgttgggagcgcaggcatgagctatcccgatcttgatttatttcatgaaaatttttgtggttgatgtcctcaaaaacatgtaagttgctctgagccagccacacacaccacatctcctctctccaaggatgaggcagtgtttccttcagtcctgggctccgagcacgggcaagggcactggcgcccccgcagtgaccgtgtttcctcccacagagaagctgaaggacgtgggcttgcaggcgcccaagcccgtgcagcaccctctgcacccagtgcctgccccacaccacacggtgcccagcctcatctccagccacggcatcttctctctgcctggaagcagcgccaccaccgccctgctgatccagcgcaccaacgaggaggagaagtggctggcacggcagcgccgcctgcggcaggagaaggaagaccgccagtcccaggtgtccgagttccggcagcaggtcctggagcagcacctagacctgggccggcccctggtgcccacagaggcggagcacaggcccgagagcaccaggtgggtcctgggtggggcctcacgtgaggcaagtgatgctggtgcaaaagtctgtctatctgtcctcctgctgttggtcccatggcctgcttcatcttctgtaccactccagccctcagcatctgtgttgaccttcagaatacagataagtctctcatcccttctcctccatgctgagaagagcaatacctggaagtaccccgggtgcccatccctggccctgcacacctcgcacagctgtagagaggccactctgaggcctcgctagtcttaaacatcctgtgctggacatgaggttcacgccaagcccgagtcctctggctcctctgccgtccgctcggtctcccacatcagcctggtcctttttgctgtcactgcgatgggggcggggtcacacaccccatagctacgaactgttaaaatgcttgttggcttgttgggtgtgtcctgtgcttgtttatcccttgctgttcagaacctgaggggagctaaagaaaccctgtgctctccctcgccggagtgaggggcagccttggcagctttaagtggcgcttcagccagactggcaagaccagaggagcctagcagtggcccctcccccacagaccttgttcttacatctgtgtgtttagggctgaccacccatttggtagcttaccccgttgcttgtccctccctctcacatctctagctcttcccccgctggcatgtcagctagtgttgttgatatccaagtcttgtctgggtggcagcttccctgtcatgcctagatagcactgcctacctgagggatcctggtacgttggcttccggagtgtgggggttgcgctgtagacggaccagtcagggctgggtccctaaaagtcacctcctgtcctctgtcttgaccaattgtggatctcggtagtagtctactgcaaaaagaggcttgcagatgcagctcctgcctgggtctggaagaggccgtggaccaagtggtgaagggcgagggtcctgggcagagctggacaatgatatagagagtgggttaaggaagcttttttgcacatctggtgaggcaagctggaagtcctcaggccgagctctggggctgctgcagttctggaaggagccacaggggggcagcagcacagccaccatcccgtgtctgtgataactgcttcctctccaggaagaaatggctctcctagcgggaaggcatggtgacagcctctccccatatgaagagttcacacctaccaggcagtctggtgtgagcccagcaagctaccctgggcattctgggaggctggtaggcagctctggttccaaaacccacggctttggtttgttctttctaggccaggaacaaaccggcatgagcagggcagccgtgaacccccacagcactttggtggccctccacccctcatctcacccaagccccagcagcacaccgtacccacagccctctggaacccagtgtctctgatggacaatgctctggagacgcggcgggccgagagccactctctgcatagccacccgactgcttttgagcccagccgccaggccgccgtgccactggtgaaggtggagcgagtttattgctcagagaaggcagaggagccccggaagcgtgaggccacaccactggacaaataccagccaccaccaccaccaccaccaccgcgggaggcaggaagtctggagcctcagacctttccccacggacctgggcctttccttactgaacttgaaaagtcaacacagaccatcttgggccagcagcggccctctctttcccaggcaacctccttcggggagctcagtgggcctctgaaaccaggctctccgtactgccaccccacagcgaggggccccgatccagcctacatctacgatgagtttcttcagcagcgacggaagctggtcagcaaactggacctggaggaacgcaggcggcgcgaggcccaggagaaaggtctggcctcctgagtgggtcccaaccttcctgggaatgggggttcatcaggacggggagactccagtgccagctgctcgcctctcttctcccacttttaacttacagtgcaatttttaaaaaattggtttcagatagcaggttcagacttctaaacctcacacaggcaaggatagagccccttgcctgtcctgcattttgaggcacattatcccaaaatggggagtcacggcccgtctgccaagacgttactgcagacatgttattgataagtgatggacagaggctggtcaggtgactttaaatataatagtgtgacgttacacagagaaacagcccagcagggcgtcacacaagggtagtgacagttgagggcacgtcctccaggggataaggacagcagctgacactgcccctgagggagcttgcttggggttaggcatctccttcctgtcggaggggacagctccctaaggtcctaagaaggtcaagagaaccagcaggggctgtagctagagaagcaggcacctgctgagggtaactgcctcaggctattctaggcccctgaatccatgtggcctgtctggtgtcacacccagctcctcttagctccgcttctgcagtgctagtcaggatagctttagggcctggctggggcctttctatcagtttactttgagaaggaatggggggctctgtggtttttagctgccttcccacgagggtcacagcaggggccatatgctcacaaagccacggtcaggtatgctctgctctgagcctagggagtctccctacaggcgtctaggcagatgggaaggggcccagccctctgagccagggtcctcgcaggtgcctgcaggcccagcccaggggtctcgctcccttgcccccctggtgcacgtgtccacagagcatcccaagtttctgagcctggctcagtgcacacatttttttgccctcagggtactactacgacctcgatgactcgtacgacgagagtgacgaggaggaggtcagggcacacctccgctgtgtggctgagcagccgcccctcaaactggacacatcctcggaggtaaccgggccctccttgactctggcatgccctgggctggctgggtagttggtccccgcttggggcccacctcttggctacctctgtggccgagctctgggtcagactgcaaggaccacgggaccctccccctccccccgggggggggggggcagtgactacacagtgtgaagctgacggtggtggcttcacactccgtttgttttctttcccgatctagaagctagagttcttgcaactttttggcttgaccacccaacagcagaaggaggaactggtggcgcagaagcgccggaagcggaggcggatgctcagagagagaagcccgtcgccacctgccgttcagtgcaagcgacagacgccttcccccaggctggctctgtccacccgctacagccccgacgagatgaacaacagccccaactttgaggagaagaggaagttcctgaccttcttcaacttgacgcacatcagtgcggagaagaggaaaggtatggccttcctccggcctgcacacacagggcagggcgctcctgggcagcaggagctgcagagttggcctctcggccctgtctggtaggcttttgtcccttggtgtttctgtcacactctactctggcacatgtcctgtttggatgggaagactgaggtgcctgtacggacagccagtgcccgtcaggacccccccctaccatcctcctgcacttggtcagagtgcctgcaggactttccctgggactgagagggtgtgctcagcctccgcttggggttgccagtgatctctacccagcactgttcctgctgctaacaggcctggagagtgagcttgtgggtggcctggagatgcccagcctacagagctaagtacaatttgcccaaaaagatgcttccagaccagtctggtaccctaggtccaggttagaaaagagacttgggactggaagacacggtatagaagacaaggtgtgaccaaggcctgccgaggctaccttgatcggctcaacacccatcttgggctgaggcgttggtgttcacagccatgcccctgtgttcttcatgccccttaagggcactggcctcctctggaagactcccaggaaaacggtgcctcccactttctggttggtctgacaggcttctttataggcgatggcggtttctttttcctttttaacaagcgtggtggaggtctcacttttcatgcaagggttactgacggcctgactgccagcgcaagcccctggacacgcgcctagctgtttgcaagcctgatttttcacctggctttgtgtctaaaggacgtcgtccatcggcaccaaagccacttaagtttcagagttggcaggaagagccactgaaccggggatctgcagtgtggaacacttgggggtctgcactccttcgtgggaaatggctatgaccctaggcggggagcacgttcccttccctggtctctgcccttgtgttggggccatccctggtcttcagatcaggatacctgctgagaaggaagtcaccatggaaaccccaggtagccgctgctcgtggctgaagactgtggctgtctggagcccagcagggacagccggctgctgtcacctgcttcttcctgtgggcagcgctggccagccggccgtggtgcttgcttttggtgcctcttggtgtgaagggcttgtacctgccagtcatggtggccagaccccgcccttcctcccctctcaaagtgctgctaacctggggctgctttcctcgcagacaaagagaggcttgttgaaatgctccgagccatgaagcagagagcactgtccgcagcagactcagtgacaaactcttcgagggacagtcctcccgtctccctgagtggtaagggagggacaccccacctgccagcgtcctgtagattgggcgacagggttagaggtggcgctcgaagtctacgtctctgctgtgaactttcctggaagtgcagggttggcttctccccatcctggctgagctgagcctcgggaagcagtgcaaaccggaaggtgggcgtgaaggtcaggggagggcgctgactgccacggtgccgccccttcagctgcaggctgtagccatcactacccacgaggatgggcctgaagcccaccgaatgccctgcctgggctctccagactgtctccagcacctgctttctctctctgcttctctgctgctctccggttgaagaaagctgaagccttgcagtgcagcctctggctagctcctgtcctcacctgctctctctgatttggatgaagttactcctaccttctcgtcgctttctgctctctctccccacctgtcccctgggaacttgttcagggttggacttgctgctaaacaggccactcctccaactcttaacctcgtgcacagtgttaacatggggtacacacactgggtctttctgcacttgtaagctctggagatgtgtagtatttgcatgcctgcctgttccacaactcataatgtccccctcattttctgtctctccaagaaccagccacacagccagctcctctagagacggatcagcctgtcggggtccctgcctccttgtcagatgtcccaaagaccacggagaccgggagactggaacagctccggccccaggagctcttgagagtccaggagccggctcctcccagtggtgagaaggccaggctgagcgaggcccctggtggcaagaagagcctgagcatgctccattacctccggggcgccgcgcccaaggacattcctgtgccgttgtctcacagcatcaacgggaagagcaagccctgggagcctttcgtggccgaagagtttgcacatcaattccacgagtccgtgctgcagtccacacagaaggctctgcagaagcataaaggtaaccaaccggccacaggtcccgtgtcacctgtcacagtactgggtgacacaggccatttacacggtgatggtaccagttaaccctttaatgcctgtgaatcactccggaaggggagacccaagcctcgatcacttcccaggcttgtagcagggcctaatgtacctgcccaagaaccacacacatttgggacagctagcaaatgacagttcaggaaggccgtgtcctctttgtatgcacggcccacagctgtggctttcccaggatctgcatgggcttactcggagagtggttctttgccagggtactgaactgtgtgcctaccgcccagggcccagtgaatgtaggtagggacagcggcttctcctgccctgctcacccaggtggaataagtgtgtgtgtgtgtgtgtgtgagagagagagaaagagagagagagagagagagacagagacagagacagagacatcccccagcaggggaaattgactagccatgccagtctgtgtctgagggcttcacatacattgtgaaggctgagctcccagtgtttgtcacagttgactctgctgctgggacccaggatcaaaggtgagcgctaggttggctaaggctaagtggaggcaaagactgcattcctgaggctcgcaggccagccagactaaaccagacaggaaagccagagcggaagccatcagtgctgacctctgacctcgccactaaggggaagctccaggaagagaagtgtcagctttggccagaggccgtctgctccctgctccttagggtggaggggctcttccaggtggcgtcactgggcagcgttcaggtgatgccaccagcggagcctgaagccccttccgttggaggccacagtccctgtccctgcccctgctcaggcagcatactgtgcttacaaagttgctgtcagtcgagcccctgcccctcaagatcctgttttcctctccccagggaactctgctttgctatctgcagagcagagccacaaagtcgacacggcaatccactacaacattcccgagctgcagtcctccagcagggtccccttgccccagcacaatggacaacaggagcctccaatggggaggaagggccctcctatgcaggaggcggaccaggactctgaggaggactctgaggaggacagcgaggaggaagctgaggaagccccgaggcgccagtggcaagggattgaggcaatctttgaagcttaccaggaacacatagaaggtaggggtttgcacggatgggtaatcgtcagatccagtctgtctactctagaggccgtctgctccctgctccttaggatggaggggctctttcaggtggcatctaagggacgtatcactgggtaatcaatgctaagacattgattttattgcagggcaagcctatggtatattttgtaccccagccctgagccctgctatggtgggacatgacagaatgttgcctggtttccacacatagctgagctctggccagccctaatcaccatgctgtgaacccacactgaagattctaggtgtttttgtctaagcccgagttgcgcacccacagtcctagagagaggtggtggtcccccattttccgtgtgcagctccctggcccatctcagagtacttgggcgcagcactgcctttggcctatctctaggctacctccttcctcccataccttacctttctctttctggcatattaattactaaagccgtaaatactgcatgtgagttcagggtctcactctgtagcccaggtcccctggtacttgtgggctcctcctgagtgctgagatcataggcgtgagctactgaaccttgaaaggcactgggaactggataccaagtgaagaacttagagactgctagagcagaagcacctattcgagtttgcctttcctcagaaggcaccgtcccgtctcccacattttgggattattgggtttaccagttcactgttcctatacctggttccgtcctgcagaaacggagtccagtcacatctcagacagaatgaatggaaatgctttcctgggtgtgccaggacacctccctgggttgtccctgtcactctgaggacacatctgctgtatggcagcagcacccctgtggcagctcactttggcttgtccttagcagctgtgtgaatttcaggatcttgtcaaaccctgcgagggtttcctgttccctgtggctcactctccatggctgacaagtgtagcttcctcgtgtggttgtgcccagcctccccatgtgaatcagaacagggacagtgcttctccagtctgcgtatttctatccttgtcacctgtcttggttgtgaaactaggtgcagcctaagctttcttcctccgtcaggttttgtcttcccctctttcctttcctactttgtttgctccacggctgacgagtgtctgtcagtctacgcggtcgtgtgtcgttcaccgaagcactctgtggtagtgcctcggtgaatcagattcggcgaattaaggatgcttttcctgcctgcgccactgacatcgcagtttttcccagttttccccactgcctggccgcatcggtgtagcaaagaacacgctgcatggtttgaagacacgctgcctcctaagaggatgacacatcgccacctcttgtcttttcagagcaaaacctggagcggcaggtgctgcagacgcagtgccggcggttggaggcgcagaactacagcctcagcctgactgcggagcagctgtctcacagcatggcggtgagtcggccatgggctttgtacaggcacccccagagaggacaggtctgctcccgagaaatcagaactcagtgccaggcatactcgccatgctttagcccccaggggacaggcagatctgggaggttgaggtcagttggggtcagcctgggacgcatagtaaggtcctgtgttaggaataaagagatgttatctgaggagaggcccttgtgcccgccccagggtgggcacatgtgcggggccggtcggacctgggattcagagcctgagctgaggcagcagtacacactggttctctgggagcctgtggtgccggaagaatgttctagcaacctccagaggtcactcacgctgctgtgtgtacagatggttctgacgcgcatcttctccccaggagcttcggagtcagaaacagaagatggtctctgagcgggagcggctccaggcggagctggaccacttgcggaagtgccttgccttgcccaccatgcactggcctaggggctactttaagggatatccgaggtgacggtttcccttgcactaggctgaacctatagtatagaaatattatctattttattaccttgaatatttaatatttttcactgggaggtttgaagcttacaaattgagaacgtgccatgcatgaaacaaagggttccaggctccagagaggagatcacctcgacgccaatgtcaccgaggcacctgtctcagctaggactcagtttctctttctgaggtcggcgttatttcctctctccccccacgtcatcctcctccgacactgacgtccaccgtgcatgtggctgagggagagagccagctggttgtttctggtatagctgtgccacgagagcccagcttgctgttgctgcggccctggggtttaacctcttcctgccaggagcgggactaatgcgccgggaaggctgggtgcgtacaagcaaagggctccccatcagtcccgtccgtctgtcgccttcccgcaagcgtcatcatcgaagccactgctcctgggagcacacaagcttctccctggaacagctcttaggaaaagaggcaaacccacacccaaaagtaccttgttttccttggggaagatgcgtggagctgtccacagatagcctacccactggattgctaccgccgtgtgtggtgttttcatacaaacgtacgttttgagagaaaagtcaaaggtgcttcagccttgtactgtgtatatattaaaaaaaaagttttgtatgtttttattactttaattattgttataaaaagcctgccatttttaatatgtggtttggggaattttgtttgtttttcctgtttgggggttttctttggtttttttgtttgtttgtttctgtttttctggatttaaaaaaaaagaaaaccttgcttttagtgtttgtactgctgctggtcagaatgttgttaactgctcagttctaggaagcaggagagctcgcttgtgcagtgtcccacacagcagggctgaggggcctagggctgcctgctctccaaagcagatgacccatgtgcggcagggactcggcaaagctgtgaggagctgagctccggagacaggcacagctctggcagaaagctcaacgctaagggatctccttcccagtttcagcacttcagtcagggctgaccaacttgaaaagagcctccgactgtcctccatcggacaggggaagaggaggccgagcccacccttagccaccaggctcagtggctgtacagagcagctggctgacatctgtccctgctccacccctgcccctacccgcacccctctggttctcagcaaactcagacaaggcagtgccaccaggcctgtcagcaaagcaccttcctctgcccacagccagtcagagaaaacgatccaaaggagggcagaggccgcacaccctgggccgagtcctgcccgacttcccagttaaatgctgcttgtgcccagtgctgctttcccaagctcaccccacctccatgactagaagcttctgcaaatctgcttggtaaatgtctcctgggaaaggcagaacccataacttaaagacacgcacagtcccttccattgtcccacaggagttcctctggctgagtatgccatccagagcaagcgatgccctcccaggtcagtctggggcacaagctgagccgctgactagcaatgcctacagcctttcccaatgcccttgcctgccctggagcttctagggccacctctagcatctggagaccgaatatccccatgctcagaagtaaagtgacaatcagaaccaggtacaagccagtaaagcggcagatgactgccactcagcccacatacggcattcttcccatcccacagtcttagagccagatgaggctaacaagaccacagtagcccccttcccaggtaccacactgtccctggagatccctccagcctagccctgctatagatctgctctagactgtgaaatcagcatgtatgtgaaaaatcccagtccttgaccatgtctcccactccacctgcaagtgattgctgccatctgtcctgggtgggatgcaccgagctagtcacgggtgtcggatcagatcttttaaaaacacttgtctcatgtaattgagacccgccaccatcgcagatgagtgacaagagagaaggctgtcaacacttcggtacatggtgatcttaaaaacacccacctgcaccatcacaccagactgtaccactagggcatccagaacaagccccaccctaacagtgggggcagggagggtacagccaggctcacagcactgagagtctcaaccagctaagctaaattgcaagctagatgcctcctgcccctgccctcagctgcccaggccccagcatggagatggcctgcacagcaggctcagcacctctgaggtgtgcattagccacttatagcagcagtctgtactctttcaagtacgcaagctttgacttcactacttgctgtagcctgtccccactgtctatccagtgcttacttcaaccctagaggctgccttgacccgaggaggcatctcactggttccgtacttgtgtgtgccctacgcctcactgctggggccctggacccagacccaggcaggagggccgacgggtgcctcggtcgctctgggggcagtttagatgctgtgaaattaaacccgttctaagtgtacttgtttgaattaactgtattgtaatattatttgttgaatgtagtaattaggtatttatgaatatattgctgtaatttctgacatcccgaaaaataaaatcttcctaaatcatgttaagacgaaattcatctttttgtatcaccacccccaccctcacgctcagcctcaactacatacagctttccacgggccaagcttgaagacacttgagctgagctggcccgaacactcgctgtgcttggcgtgcagtccttgggtggaagagaaaggctggcggcttctctgttcaatggagttgaacttgcagtatggctgacctctgacaaagacgggcagcaaccttaccagtgttccacactcttcccccaatctccgccacacagggcacacagcagggtttgcacagcagaggcctctggctagaagtcctgcgactgggtgctctcggagggctggaggtttgtgcggagcttgtacatgtggttgagggcctgggtgaggaaggccccgctgctgctgatctccatcaaggtcaggttgtccagctgaaacacaaaagcaagtgagcggaggaagtcttggctttaaggcaaagctagactgctcaaccgtgagttgttggctcctggtactgagggtgtaggcaggctctgagagccaaacccccaagtcccagtgagccactgctcaaagcacagcttcaaatccctgtttcatgctgagcaggcagcatggcctgacagctccctgggaagcggtcacactggcaggcagtgcccactggcaccgggcagggacaggagaaccatgcctaccttggcatgtgcctcttgctgccgcacaaaactgtcagcagacactcgaagcttggccatgcgtgtgtcccacaggtctttgatcagtgtccggatggtgtctgctttggggatgttgtcagaagcactgaagataaagaggcagaaatatagaggcactcagtaagtttaccggggacaggcagaaatggctgcttcaaacagcagcataggggcaggacagcctagcagttagtgctttgtgcccttcccgaggataccagttccactgacagcatccagcgggcaatgcccgactgcttataccaagatacaatgcatcctagcctctgtggacccggaacgtgaagtcggtcacagccacatgcacagaaacgaatctttgtaaacgaagcttgagcacatgactgtgaccctagaactcagaaggatgaagccaggagaatcagaagttcaaggatacatagagactccgtttgaaaggggtcgggggagcctcgcacagacttgagagaatcctggggctctgttctttccttgggttaggatgtcggcaggtaaagcttagcagccatggccagtggctacacagaatgacagagcagtgacgtactaaaagccaggagtggaaattataatcccagcacgtggacatacatgcaggatagtacaaatcttgtagacaataacacactggaggggctagagacagctcagcagttaccagcacatactgctcttgaaaggacctaaatcagttcccagcaacctccgtggagcagctaacaaccgcctgaaattccagcttcaagagatccaattcgctcttgtttccttgggcactgcacttacacacacataaccacacagacacaaacacatggaattaaaaaggaataagaatatgtctttaaatgaaaactgagaaattggacagttgggacactcccttcaggataacaacagcctctgctgtgtaatttatctcaagttggtatggaggctggctcagatcagcagctccctggtttttaacagtgacataggctcactatccatcaccaccaggcaagctccgtgcaaagccctttaagtggtatgtctagtctcacaaaggctgagagacaggactgccactgtgggggacacaaaaccacagagcagaaaagcagagtctcaaagcttaaggtgagcaggtagtgacaactttccttcaggatgtacgtgaagccaccctttgaaggagctcacatgagacagaggcagactcgtgcgacccagcactgggcactctgggctgagctagagcctccaaggccagccagctcaggagctgtaggcagatctgtggtagtgtgtgtgtagtgaactgaatatgaacacagcattcggatcttatgcttacaacaaagacctccagatcttcagcaagtgaactacagaacaaaggaaaactgggtccctggaccagtgcggcagctcggcatgtgaaggtattggtggctaaacctgacaagctaaagccagtctctggaggcacgtgctaggagagagccaactcctgaaagttgtccttggaactctgtgtgcatgtcatgccaacacatgtatgccaaaaaaaatgtttttaaaattttatttgtgggctggtgagatggctcagtgggtaagagcacccgactgctcttccaaaggtccagagttcaaatcccagcaaccacatggtgactcacaaccatccgtaatgagatctgatgccctcttctggtgtgtctgaagacagctacagtgtacttacatataataaataaataaatctttaaaaaaatttttttatttttattttttccagacagggtttctctgtgtagccttggacgtcctggaacttgcattatagaccagactggcctcaaactcagagatcccctgcctttgcccccaagtgctaggattaaggctggcaccaccactggctggctaaaaaattttttttcctttttttatttttttattttttggtttttcgagacagggtttctctgtatagctctggctgtcctggaactcactttgtagaccaggctggcctcgaactcagaaatctgcctgcctctgcctcaagtgctgggattaaaggcatgtgccaccactacccaacttaaaaaaacttttaattgtgttccttggccagataaattacacagtaaggttttgttttggtttttgacagtgtctgggggctggagagacggctcagtggttaagagcactggcaggtcttcctgaggtcctgagttcggtttccagtacccacatggcagtccactgcccgtgactcctagttctagagaatctgactccctcacatgtgcaggcaaaacaaaaaagacagggtcttactacatagcccaaggtggcctgcaagtcgtaaagtagtccaaactggaactcagcgacctgtctgtccctatcccccacccatctcagtgctgggattaaaagtacgatgccacccgcaatgtcttgggagattgcttaatccaccaggagcaagagtctgattctcagtcacgcttcaaggctctcccctttcccagcactgcccccacaactttgccagtctcccgcagagctctgcggacgccagctccctgggcctccccataaacacagagcccatggcccattgtgtgcccacattgatccccaacccccccaaagcacacagagtcacagtgccttatcgctcctcccacctcagctctctctctctgctccttgggacactctgctgtcctgctcaactctgcgttccttacacgccttctctggccccaccaggccttgctgtgtcctatggactcccatgggcactgactgtgtggcggttttatgaccagttcacagggtcacaattgttctcttacccaaatgggaactcaggcccacatgaccatgtttacagcatattgttagaggacagaatggcctcccatctttgaggagcacttgaggagcactgctctcggaaggagcagtgacagcagtcccactgtccagctgctctaagcgagcagcacggttctggtcttggtgccagttctgcttccgcacagctgagggagcagggtctagcctatgctaagtaagttaggcctgggcatctgcttacactcagcgcccctgtgtgaggcttgctggagacaggccctgcccatctaggacagtgggcacgatggcacagcacatggaggactccaaaactgcactgtggcacacgccagaacaaagctctgcagaccctaggcaaggaagaaagacctggagcaagaggaccactaaagcccagagttcaggaccagtgtaggccataaagcaagactccatatcaaacaaacaaacctgttctacagcagaccactgggatcataaaaatacagactgagagcaaaggagagcagtgagagatagggacggggcacctgctgtgagcactctgactagagactgaagctagaaaggctaagggctgcagccagggcagcaccaggcagcctgcccactacatggagaataaaccagaagaccgagttgggacagatacgaacgctcaaacccagagcttgccagggcacatctatcgctatggctcaggaccagcacccactcaacacccttgaccagtcctgtgacagacgcagggaagccagatccgtacactttcagggaaagctggattcaatgaagctcgtgtacctgagaaaaggctgctgctagactgtcagcggccacactacaacccagtgacaggtgacagaccaggaacgttagaacccaaggaggagagagaaagaacaggagagaacagagacggcctggacaccctgcagacacctcctccaggtcacctgtatgagaaactgagtgtctaagccaccacggactgggcaggggagcaggaggagactcgggtcacggaggggatgcgctgtccctgtgctaactcactgattcagcaggagcttcgtgatctccatgtagtgcgggctgggcactggggtgaatgtctcctccttccgctcctcatcacgcatctgttccagtttctctgaaacacagacgtcaggatgcttcaccatcaccacaacaaagaaaacaatcggtcgggttggtttggttttgtaagacatgggttctctgtgtatcccttggctgtcctgggctcgaactcagaaagccacctgcttctgcctccaaagtgctgggattaaaggcgtgcacccctcctgaatgagaaaactttttttttttttttttgggttttcaagacaaggtttctctgtgtagccctggctgtcctggaactcactctatagaccaggctggcctcgaactcagaaatccgcctgcctctgcttcccgagtgctgggattaaaggcatgcgccaccacgcccggctgagaaaacatttttaatcttacaatttgaccaggtgctggtattgcccgtggccaataagcatgtgtatgtggcatacaaacaatgtggggggcattcatatcaaagctttacagacatgtctcaggaagagctgtcaccactacctatggactttcttctgacctagctgcctgccttctactcatgcctgaagccaattctccacgacctgtcagcgccggggtccagagctccgtaggtgaggcccctccaccggcaaggccaaacctctggccaggatgtgggacaatgtgacctcctcgacagttctgtgggattcggacctttcaacactcagcaggactgtctggcagccgcttataacttaagaatcatctgtcctctagcccaacaggtccccaacaggaggtatctgttggttatcctaaggaaaaccaagccaggaggcagagcgcagacacctgtcacccagcaagagggctagtggaggcaggagggtcatcaggtgaagccctgtgtcagctacgcagcaagcaggcagcagcctgggctgcatgaggccccgtctcaaccaaccaaagggaaacaccgatctacagaaaggctcacacaacggtacaaaatgagacgtgacctggggactggggagatggctccatagataaaggtgactgtcaccaagcctgatgaagctagacactgtggaaggccagaaccccactctttaacacgctgtcctctgctcacccctgcgccacacacggcacatgtgcagacacacggacacaataatgacttttaagactgggaaacggggctggagagatggctcagccgttaagagtaattgtatctctgtcagagggcctggatttgggtcccagcactcatgtggcagcaactacctacctgtaaccccagttccaggggatccagagagcctcttctggcctttgaaggcactgtgcgccaagtggcgtacatgcatacatacatacaacacccttacgtacaaaaataaaaaaaaatatttcaaaatgggcagtaacctaaatacccattcacaggatgggtaagtagatgcagaatactcatgcaagagaaaacctaggataacaaggtgatggccacgtgaccacaggccaactgcaaaccacacatttccagaagacagagccgcatggcacacgacagcattctgttgacctcagatcccaggacagagaggcctcctgcactcctgactgctcctctccatgtagcaaaggcaatagaagtctgttcccctgctccccaaccctggccagcagacactgggaaatggactcaggctttgggggacaggggtgctaaagatgcccctcaaggcacagaaactggggtcccagtttcaagactatcagagtcaccagacagtggtggcgcacgcctttaatcccagcacttgggaggcagaggcaggcggatttctgagttcgaggccagcctggtctacagagtgagttccaggacagccagggctacacagagaaacaaaaaaagacaaacaaaaacaaaacttgtttaaggttgcatctctgttccccaatccctacctgtactggctagttttgtgtcaacttgacacagctggagttatcacagagaaaggagcctcccttgaggacatgcctccatgagatccagctgtaaggcattttctcaattagtgatcaagggggaaaggccccttgtgggtggtgccatctctgggctgataatcctgggttctataagagagcaggctgagcaaaccaggggaggcaagccagtcaagaacatccctccatggcctctgcatcagctcctgcttcctgacctgcttgagttccagtcctgacttccttggtgatggaagtgtaagccaaataaaccgtttcctccccaacttgcttgttggtcatgatgtttgtgcaggaatagaaaccctgactaggacaccaccccacccccagacagggtttcactgtgtagtcctggctgtttgtcctgcacctccctctgtggaccaagctggcttcaaactcagagatcttcctgcctctaccgcctctaaagagtgctgggactacaggcgtgcgccatcactacagccccctccccgtacaagcccgcccacccgggcccgggaatgctcacccacatccatccattccggaggtaacaggcggcacttctgtctctgtttcaggttaatggccagccacaggggcacgtccacgggtaagccggggttgaagggccccaggtccccctgcaaggacaacgcagaccccaggtggaaaggagcggtgacccgagcatgatcccaggccgccgccccgtaccgccctggctcaccccgatcaggtagatcttgtccagactgaagttcgggatgatagtcaccaactccttttcggccaaaaactccacctcggccgcatccatgttgaagagtaggcggcccaggcccgttaccgcccctccgcgactcagaggcagcgcctcaggcacttctttcccgccaccgcgcggggcccgcccctcgaacggaagacgtcctgcggcggccctatagagacgttgctctcttcgcagcctccaagtcacagctagtacaaactcgcggattggtctgtaggcggagctgtacgccggccccgcccctctaaggcctaccgatgccctttccagtacttgggctccacgcttcctgaatcctgatccagcgagttacagccctgacggccccgccctactacgtcactaccctctctaggccccgcctctggcccgtccgctttttttcattggtctccgggtctgcctcgactccgcctcttgcccgcctaccacgctcacggccccgcacctacctcgtttgggtcgggtctgtacagccccgcctcttgctcccgcccctccttcgttcggcctcgcccctcctgcgcccgcccccttctgtccacgagctggaggctgtgtacttatggcttcttgctcctttgcgtcctgcagcaggctgagtccctcgcctgattccactctttgagggtaaaggtttggagccgagttttcacctgcgcgaaacacagatccaggaataaacgcattcatctcaaagtcagctccgggtccccggacatggctggctggtccacacagacgccatatcgaaggaagtgttttccctttaattttagtctttgccctttctacagatggtttaaaagcaatgaaaatgcgcctcccctatctgctccatgcagatccttcgagacagagcccagaatcagaactttggcaaaccaaacctcaggtgagactacagggacaagtttgcacacgtattatcattcttttattattgttgttattgcaattgtgaagatggaaccccggtcctcaaaaatgataagcacagcctcttccactgagctataccctggagcctgatgccctcaagccttctgtacagagtgccttggtaagccaacagccctagagtccttgcattaatatggccccacaggggcattttgaatcaggagtcttgtgaggacagctgaactattaataggcattataatcagggtgactctggcagggtgccagcagaccagggtagctcctggggaggaataggtcacctacaactggtaaggacaagaggggctggatctgagtgtgaaaccctcaccactgggcgctgaggtgaggtgtaatcttagtattccataggtggaagcaagaaggatcaccagctagggacagcctgagtcactcagcatttcctatctcaaaaataaagatatgcaaggataggggcgtactctaatagaggggttaccccctgtcttagtcagggtttctattcctgcacaaacatcatggccaagaagcaagttggggaggaaagggtttattcggcttacacttccatgctgctgttcatcaccaaggaagtcaggactggaactcaagcaggtcaggaagcaggagctgatgcagaggccatgaagggatgttccttactggcttgcctcccctggcttgctcagcctgctctcttatagaacccaagattaccagcccagagatggtcccacccacaaggggcctttcccccttgattactaattgagaaaatgccttacagttggatctcatggaggcatttcctcaagtgaagctcctttctctgtgataactccaattgtgtcaagttgacacaaaactagccagtacaccccccccccccatgtacacagccctgctatagtggtttaaatgagaatggcccccacaggttcttagatttgaatgcttggtccccagttggtggaactgtttgggaaggattaggaggtgtggccttgttggaggaggcatgtcattggggggtgggctctgaggtttcttttttttttttttttttaaatatatttatttattattatatgtaagtacattgtagctgtnnnnnnnnnnnnnnnnnnnnnnnnnnnnnnnnnnnnnnnnnnnnnnnnnnnnnnnnnnnnnnnnnnnnnnnnnnnnnnnnnnnnnnnnnnnnnnnnnnnnnnnnnnnnnnnnnnnnnnnnnnnnnnnnnnnnnnnnnnnnnnnnnnnnnnnnnnnnnnnnnnnnnnnnnnnnnnnnnnnnnnnnnnnnnnnnnnnnnnnnnnnnntggctcagtggttaagagtactgactgctcttccagaggtcctgagttcaaatcccagcaaccacatggtggctcacaaccatcctgtattgggat

SEQ ID NO: 2191 - DNA, 6134 bp, Mus musculus
cgccgtggcttggacgctggttttgtttcattgctgggcttgatttttttttttttttcccctcatttccttcttcgtccctctctggccactatggaattctaacatgagccatgttcggactgaagccgcctctctattacttaccaggccccggaagctccacctccccgagcggcggagccgccgccgcacagccccgggtgagataagcagttcagacaaacccgggcgacggtggctccggcatgtgtcaggagcggtggagcagcggggccctggcatgaaaggcatgagccatgagcccaagtccccttccatagggatgctttccacggcgaccaggaccaccgccaccgtcaaccccctcaccccctcgccactcaatggcgccctggtgcccaccggtagcccggccaccagcagtacgctgtcggcccaggccgctccatcctccagctttgctgccgcactgcgcaagctcgccaaacaggcagaggagcccagagggtcctcactgagcagcgagtcatctccagtgtcctctccagccaccaaccatagctctccagctagcacgcccaaacgagtgcccatgggccccatcatcgtcccccccgggggtcacagtgtccccagcactcccccagtggtcactattgcccccactaaaaccgtcaatggagtctggagaagcgagagccgccaggactctggctcacgaggcagcagcagtggtcgggagcgcctattggtggagccacctctcgcccaggaaaaggctgcgggccccgccatcccctcccacctactcagcaccccgtacccctttggcctttcccccggctcagttgtacaggactcccgcttccaaccactcaacctccagcggcctgtgcaccatgtggtgccccccagcacggtgactgaggactacttgagaagcttccggccctaccacactgctgaagacttacgcatgtcctccttgcctccgcttggcctggacccagccaccgccgcagcctactatcaccccagctacctggccccacacccattcccccacccggccttcaggatggatgactcctattgcctgtcagccttaaggtctccgttctaccccatccccacccctggctccctgcctccactgcatccgtcggcgatgcacctgcatctctccggcgtacggtatcctcctgagctctcccactcgtccctggcggcgctacactcggagcggatgtccagcctcagtgcagagaggatgaggcagtgtttccttcagtcctgggctccgagcacgggcaagggcactggcgcccccgcagtgaccgtgtttcctcccacagagaagctgaaggacgtgggcttgcaggcgcccaagcccgtgcagcaccctctgcacccagtgcctgccccacaccacacggtgcccagcctcatctccagccacggcatcttctctctgcctggaagcagcgccaccaccgccctgctgatccagcgcaccaacgaggaggagaagtggctggcacggcagcgccgcctgcggcaggagaaggaagaccgccagtcccaggtgtccgagttccggcagcaggtcctggagcagcacctagacctgggccggcccctggtgcccacagaggcggagcacaggcccgagagcaccaggccaggaacaaaccggcatgagcagggcagccgtgaacccccacagcactttggtggccctccacccctcatctcacccaagccccagcagcacaccgtacccacagccctctggaacccagtgtctctgatggacaatgctctggagacgcggcgggccgagagccactctctgcatagccacccgactgcttttgagcccagccgccaggccgccgtgccactggtgaaggtggagcgagtttattgctcagagaaggcagaggagccccggaagccgaggggccccgatccagcctacatctacgatgagtttcttcagcagcgacggaagctggtcagcaaactggacctggaggaacgcaggcggcgcgaggcccaggagaaagggtactactacgacctcgatgactcgtacgacgagagtgacgaggaggaggtcagggcacacctccgctgtgtggctgagcagccgcccctcaaactggacacatcctcggagaagctagagttcttgcaactttttggcttgaccacccaacagcagaaggaggaactggtggcgcagaagcgccggaagcggaggcggatgctcagagagagaagcccgtcgccacctgccgttcagtgcaagcgacagacgccttcccccaggctggctctgtccacccgctacagccccgacgagatgaacaacagccccaactttgaggagaagaggaagttcctgaccttcttcaacttgacgcacatcagtgcggagaagaggaaagacaaagagaggcttgttgaaatgctccgagccatgaagcagagagcactgtccgcagcagactcagtgacaaactcttcgagggacagtcctcccgtctccctgagtgatgtcccaaagaccacggagaccgggagactggaacagctccggccccaggagctcttgagagtccaggagccggctcctcccagtggtgagaaggccaggctgagcgaggcccctggtggcaagaagagcctgagcatgctccattacctccggggcgccgcgcccaaggacattcctgtgccgttgtctcacagcatcaacgggaagagcaagccctgggagcctttcgtggccgaagagtttgcacatcaattccacgagtccgtgctgcagtccacacagaaggctctgcagaagcataaagggaactctgctttgctatctgcagagcagagccacaaagtcgacacggcaatccactacaacattcccgagctgcagtcctccagcagggtccccttgccccagcacaatggacaacaggagcctccaatggggaggaagggccctcctatgcaggaggcggaccaggactctgaggaggactctgaggaggacagcgaggaggaagctgaggaagccccgaggcgccagtggcaagggattgaggcaatctttgaagcttaccaggaacacatagaagagcaaaacctggagcggcaggtgctgcagacgcagtgccggcggttggaggcgcagaactacagcctcagcctgactgcggagcagctgtctcacagcatggcggagcttcggagtcagaaacagaagatggtctctgagcgggagcggctccaggcggagctggaccacttgcggaagtgccttgccttgcccaccatgcactggcctaggggctactttaagggatatccgaggtgacggtttcccttgcactaggctgaacctatagtatagaaatattatctattttattaccttgaatatttaatatttttcactgggaggtttgaagcttacaaattgagaacgtgccatgcatgaaacaaagggttccaggctccagagaggagatcacctcgacgccaatgtcaccgaggcacctgtctcagctaggactcagtttctctttctgaggtcggcgttatttcctctctccccccacgtcatcctcctccgacactgacgtccaccgtgcatgtggctgagggagagagccagctggttgtttctggtatagctgtgccacgagagcccagcttgctgttgctgcggccctggggtttaacctcttcctgccaggagcgggactaatgcgccgggaaggctgggtgcgtacaagcaaagggctccccatcagtcccgtccgtctgtcgccttcccgcaagcgtcatcatcgaagccactgctcctgggagcacacaagcttctccctggaacagctcttaggaaaagaggcaaacccacacccaaaagtaccttgttttccttggggaagatgcgtggagctgtccacagatagcctacccactggattgctaccgccgtgtgtggtgttttcatacaaacgtacgttttgagagaaaagtcaaaggtgcttcagccttgtactgtgtatatattaaaaaaaaagttttgtatgtttttattactttaattattgttataaaaagcctgccatttttaatatgtggtttggggaattttgtttgtttttcctgtttgggggttttctttggtttttttgtttgtttgtttctgtttttctggatttaaaaaaaaagaaaaccttgcttttagtgtttgtactgctgctggtcagaatgttgttaactgctcagttctaggaagcaggagagctcgcttgtgcagtgtcccacacagcagggctgaggggcctagggctgcctgctctccaaagcagatgacccatgtgcggcagggactcggcaaagctgtgaggagctgagctccggagacaggcacagctctggcagaaagctcaacgctaagggatctccttcccagtttcagcacttcagtcagggctgaccaacttgaaaagagcctccgactgtcctccatcggacaggggaagaggaggccgagcccacccttagccaccaggctcagtggctgtacagagcagctggctgacatctgtccctgctccacccctgcccctacccgcacccctctggttctcagcaaactcagacaaggcagtgccaccaggcctgtcagcaaagcaccttcctctgcccacagccagtcagagaaaacgatccaaaggagggcagaggccgcacaccctgggccgagtcctgcccgacttcccagttaaatgctgcttgtgcccagtgctgctttcccaagctcaccccacctccatgactagaagcttctgcaaatctgcttggtaaatgtctcctgggaaaggcagaacccataacttaaagacacgcacagtcccttccattgtcccacaggagttcctctggctgagtatgccatccagagcaagcgatgccctcccaggtcagtctggggcacaagctgagccgctgactagcaatgcctacagcctttcccaatgcccttgcctgccctggagcttctagggccacctctagcatctggagaccgaatatccccatgctcagaagtaaagtgacaatcagaaccaggtacaagccagtaaagcggcagatgactgccactcagcccacatacggcattcttcccatcccacagtcttagagccagatgaggctaacaagaccacagtagcccccttcccaggtaccacactgtccctggagatccctccagcctagccctgctatagatctgctctagactgtgaaatcagcatgtatgtgaaaaatcccagtccttgaccatgtctcccactccacctgcaagtgattgctgccatctgtcctgggtgggatgcaccgagctagtcacgggtgtcggatcagatcttttaaaaacacttgtctcatgtaattgagacccgccaccatcgcagatgagtgacaagagagaaggctgtcaacacttcggtacatggtgatcttaaaaacacccacctgcaccatcacaccagactgtaccactagggcatccagaacaagccccaccctaacagtgggggcagggagggtacagccaggctcacagcactgagagtctcaaccagctaagctaaattgcaagctagatgcctcctgcccctgccctcagctgcccaggccccagcatggagatggcctgcacagcaggctcagcacctctgaggtgtgcattagccacttatagcagcagtctgtactctttcaagtacgcaagctttgacttcactacttgctgtagcctgtccccactgtctatccagtgcttacttcaaccctagaggctgccttgacccgaggaggcatctcactggttccgtacttgtgtgtgccctacgcctcactgctggggccctggacccagacccaggcaggagggccgacgggtgcctcggtcgctctgggggcagtttagatgctgtgaaattaaacccgttctaagtgtacttgtttgaattaactgtattgtaatattatttgttgaatgtagtaattaggtatttatgaatatattgctgtaatttctgaca

SEQ ID NO: 2192 - protein, 1104 aa, Mus musculus
FFFFFPLISFFVPLWPLWNSNMSHVRTEAASLLLWRKLHLPERRSRRRTAPGEISSSDKPGRRWLRHVSGAVEQRGPGMKGMSHEPKSPSIGMLSTATRTTATVNPLTPSPLNGALVPTGSPATSSTLSAQAAPSSSFAAALRKLAKQAEEPRGSSLSSESSPVSSPATNHSSPASTPKRVPMGPIIVPPGGHSVPSTPPVVTIAPTKTVNGVWRSESRQDSGSRGSSSGRERLLVEPPLAQEKAAGPAIPSHLLSTPYPFGLSPGSVVQDSRFQPLNLQRPVHHVVPPSTVTEDYLRSFRPYHTAEDLRMSSLPPLGLDPATAAAYYHPSYLAPHPFPHPAFRMDDSYCLSALRSPFYPIPTPGSLPPLHPSAMHLHLSGVRYPPELSHSSLAALHSMSSLSAERMRQCFLQSWAPSTGKGTGAPAVTVFPPTEKLKDVGLQAPKPVQHPLHPVPAPHHTVPSLISSHGIFSLPGSSATTALLIQRTNEEEKWLARQRRLRQEKEDRQSQVSEFRQQVLEQHLDLGRPLVPTEAEHRPESWGTNRHEQGSREPPQHFGGPPPLISPKPQQHTVPTALWNPVSLMDNALETRRAESHSLHSHPTAFEPSRQAAVPLVKVERVYCSEKAEEPRKPRGPDPAYIYDEFLQQRRKLVSKLDLEERRRREAQEKGYYYDLDDSYDESDEEEVRAHLRCVAEQPPLKLDTSSEKLEFLQLFGLTTQQQKEELVAQKRRKRRRMLRERSPSPPAVQCKRQTPSPRLALSTRYSPDEMNNSPNFEEKRKFLTFFNLTHAEKRKDKERLVEMLRAMKQRALSAADSVTNSSRDSPPVSLSDVPKTTETGRLEQLRPQELLRVQEPAPPSGEKARLSEAPGGKKSLSMLHYLRGAAPKDIPVPLSHSINGKSKPWEPFVAEEFAHQFHESVLQSTQKALQKHKGNSALLSAEQSHKVDTAIHYNIPELQSSSRVPLPQHNGQQEPPMGRKGPPMQEADQDSEEDSEEDSEEEAEEAPRRQWQGIEAIFEAYQEHIEEQNLERQVLQTQCRRLEAQNYSLSLTAEQLSHSMAELRSQKQKMVSERLQAELDHLRKCLALPTMHWPRGYFKGYPR

SEQ ID NO: 2193 - DNA, 83346 bp, Homo sapiens
  misc_feature (1)...(83346): n = A, C, G or T/U
tggaaactacaggccctgccctgcatctggcctctcccagggacaggcagaggccttcagattggatttttttgttttgttttgagacagggtctcactgtgtcgcccaggctgtggtgcagtggtgcggtcatggctcactgcagcctcaacctctcaggctcaagccagtcctcccacctcagcctcctgagtaactgggaccacagacatgtacccccaagcctggttatttttttattattattttttgtagagatggagtttcactatattgcctgagctggtctccaactccagggctcaagcgatcctccctccttggcctcccaaaatgctgagattacaggtgtgagccactgggcccagcccagattggattgtttttaattgaggtgaaattcatgtaacatacaattagccgttttaaagggtacagttcagcggcatttagtacattcctaatatgcagccctcgtctctgtcctggtccaaatcattttctttttttctttttaattataaagaaaagcggtataattggttcatggttctgcaggccctgcaggaagcatggtgctcacatctgctcagcttcgggggaggccccaggaaatttacaatcatgagggaaggcaaagagggagccagcatatcacgtggcaaaggcaggggcaagacagagggaccaaaaggaccaccccaaaaggaaactcagatccattagcagccactcccctctcccctcccctagccctaagcaactactcctctgctttttgtctctggatttgcctgttccgggcatttcatacaaatggaatcccccttgtttgtctggcttcttccatccagcatcgtgtcttcaaggttcatctgtgttgtagcgtggattagcacctcagtcctttttatggctgagtaatagtccactcactgtatggataaaccatgttttcttcatctatccatcatctgatggacatgtaggttttcactttttggctatgatgagccatgctgataggaacatccgtacaaggttttgcgtggacgcgaaggtatgtttcatgcctcactgtgtatcaggccccattcctttctgtggctgaataatattccattgtacacagagaccacattttgtttatctcttccccccgttgatggtcacatgggctgatttgataatttttaaagatgcaccttctgaggcgggaggatccttgagaccaggaggtcgagactgcagtgagctatgatcgcactaccgcgctccagcctgggcaacagagtgagattctgtcaaaaaaaaaaaaaaaaaaaaaaaaaaaaaaaaaactatatatatatatatatatatatatatatatatataaaaatataaaagaaagatctctgagagggaaagccggacagggtgctgtcagtatctttctttttcatatatatatatatatatatatatatatatatatatatatatatatattttttttttttttttttttttttttttttttttgagatggagtctcgctctgtcgcccaggctggagtgcagtggcgggatctcggctcactgcaagctccgcctcccgggttcacgccattctcctgcctcagcctcccgagtagctgggactacaggcgccctccaccacgcccggctagttttttgtatttttagtagagatggggtttcaccgtgttagccaggatggtctcgatctcctgaccttgtgatccgtccgcctcggcctcccaaagtgttgggattacagatgtgagccactgcgcctggtctgctatcagtatcttcacacttacagaagccagggacttgggtggccggctgggccccacccgctgtcctgctccccttgcctagtgaccagccaggggccggcaggggctgggctcacgcaagttgctggtgtgattcttggagtgtgtgtgacattccaaggcctctcctaatgtcggaggagaaaagagttccgctgctctcactctaggcccaatgtcccagggcagaagtggtctaagtgaccgacctccctgcccatctggtctggcgccgagaagtgcttcctcgtaaaactttatttgtctgtgctgccacctttccacttcctccgcacagcaaatgtaagggaatgcttctgagctccagcttcgtcccaggcactgggcatggctctctctattgtcttgtctggtcctcaccaaagtgggggcagggggacacgttccttgcagggcagcagctaaggaaacgggtgtgcagtgggtggagatttgcccagtccggcagcttgactgccatgtccatcctccccctgcacccccgggggggccaccggctgtgctctccaaagccacattttaacgtttgctgtctgggtggtcattgaatggggttaacacgtctggccccagggtgtttttagaggtaagtggtagagagggtgctgcccgtagcgagccggataaactgaagaccgcattgtaggtgatcagaagcctcaaacagcaggctgggctcatgggcggcccaggagctgagactgccttgcttggactggagatagtttcctgatgggaagaaaagttgcaaggaggagaccctgctcccctctgattgctgccagtgaactggacctgtttctgccgtggtttctgttgagttgacatcattgaaagctacccatgtgcccatcgggcttggccgccagcccctgccctccttctcacctccaccacagaagtttcggctcctgcccttgaagtctgccgtggcacagcccactccagcaggcctgccaggtagacggggttctcagcgccctgggattttataaaagcctgctaaaatcagaccactccggaacacatgctctcccggctttacatcacccatgttgacagtaggaaaatttggccaggtttctctcaaatatgaaaaatgggaactaggcatgtgaggaaatgaaaacctggcatccccaccccagacagcaggagcgctgggaaggcagggcggacttctccgagctccacaacctcatccgtgcagtgtagtgatgccagcctgcagggccctgaacgcggacctggtcaggtgccctcacacagctgcactgtctggatgtgcaggggatggaacggagggcttcaggccaccagaggcggctcctggcagaacgtctccttgccaggaaggggccactttgccactgagtctgcccgtcactgggtcctggagcttctgggtgacccgggagagggacaggttgtggacagcagttgagccaggcccaccaccagggtgcaggacccagcctggatgccctgggatccctgtggcttgcctgtggcagcccaagtggacgcaagctcttcccaggatttcagacacctgggacacttagacttggccagggccgtctggctagcaggggccaacttgtctcccagacagtaacagggcaaggggtatgtgtggggggtgctcactggtggcagaagcgtccaaaactcccaggattctctgccccccatcaagggtccgagcgctgctcccccagcccccttcccctgcctcggcctggccccgccatataaagtttaaaggttttaaatgcaaatatttcttttatagatgccagctgtctccagagagtgcgtttccttgctgttcaactttactgtccaattagcttcccatatctggatactggagagcctggggtggggggggcgggnnnnnnnnnnnnnnnnnnnnnnnnnnnnnnnnnnnnnnnnnnnnnnnnnnnnnnnnnnnnnnnnnnnnnnnnnnnnnnnnnnnnnnnnnnnnnnnnnnnnnnnnnnnnnnnnnnnnnnnnnnnnnnnnnnnnnnnnnnnnnnnnnnnnnnnnnnnnnnnnnnnnnnnnnnnnnnnncatggctcctgggccagctctggagctggaagctgccctctgggacctgtatctgggttggggtcagggagcccaggtcatagagtgggtgcctctccagaggtgggggtcacccgtttcaggtttccccgctccagtaggagaggcaggagctggggggcggttggtagcaggggtattcttttctgatttagaaaaataaaagccagcagccccgacgcacacggcttccttttactccctctcccgcccgctttccagccgcggtggcggcgtccccattcaccagggctcggcggcgctcacaaagcgaggcaattagaattgaaaatctatgcaaaacagctgttaactgattgtaaaggagtgcagctgtgtgcggggtgcggattggaaccaggcgctgagagggcaggaagtgtggggcagcccggggttaagaggaaaactcctcaaagggagttagccgggccttaaccctttcctgttcccctagaggtgacctgggctactgagggccacctgagctgctggggtggggctcccccagcatccctggcgaatctggttcctccccaagagggggcaggcagggagaggcgggcgctgctttcccctctctccctccagcctttatccaatcagcagatctgggttaaatcttaaatcctgcccagggtctggggactgtgtccctgctaggagacaggggccttcttcccttgaggcccccactgccactctggagcagggagtctgggactccagcagacacgctgtggcccggcctgcagggtggctggtggaggatgcttcttctcaggcactgcttggagaccttggctccgtaaggggaggggcctggggatctgtattcctcccccccatgatttcagacccactgcactgtgtgattgctatctaagagtgggacgcaacctggagagatgaattccagaggcagggatgggaaaagccttcttgcaagagataagatgtaagccgggctttgaagaatggggaggatttctgggccagtgatagcagggcaggaaacagaaagaggagggtggaatctaagtggtgggggcttgcaccttcaccgatgcgtagggcagggctgggggctgagggcagatggggtagctgggcagccttccacccctcagctcttcgtgccccccggattcagtgcactctgtggacttagccccccgccccttgcccctgcaccggggctggtagccttggggagggtggactgtgcatacaggggagctgggtgaatcccagggtgctcagctctaggcagctaacggctccctcccccggcccccaaccaaaatggttttcaggcactggacagctgcccagaggtaagagcgtagacctgaaaccgcttgagacctgtcgtacccctgcaggtgtatctttcttaataatcagagtgaccatggcaggtggttaccgagaagtgctgccaggtgtaagagccacgtctggatgagactcgtgctggaatgtgtgtgcctgaggcaggccaattaaccttctcaggtctccccactcgggctgtgtaatggaggtcactgcctgccttgcagggccgggagggcttccagtgacatgcgctgagcagcgctggctcttgttaggtgcttggtgaatggcacaggtgatctttacctcctggcccacggacatccaggtccctgatacttattggcggatccaggcgctgaacaaggtgcccaggcaacataatgaaggtgacatgcagttcctacgtgctaggagcaactggccaggatggagaaggaccttgggttaggctgtgtgctgtcctgctgagccctagaagaagcaagaaccagaaagaacgtgtccgggatccatcctccgccagggctaggccgtgtgctcagacttagtgaggttgtgacagtcacgggtggcgcccgcacccctgagcacctgacgtggcccaggttgatgcccaggcagtggtggtggtggtctgtgctgtcatcctgcccccttgccttccaaatttccttgctgccttgaagtgtcccctctgtcagcatctgccctctgctgtctgtcccttgccgcccccacctttaaaaacaaccaaaaaaagacaaggtcttgctctgtggctcaagctggagtgcagtggcacaatcatacctcagcctcagactcctgggcccaaatgatcctcctgcctcagtctcgcgagtagctgggaccacaggcttgtgccatcacacccagctaaccctggcctctctgaggtgcttgctgaaggcttactggaattttcagttttgtttctggaaaaccaagtgtgaaacacagcccagggtttagtgtgtttgttgagtgaaaaaccgcccaccctctgtggttcaaggcgtccctttctttctggtggatcctcctaggactcccgtctccagacacccctcttagttcctgagctcagggagtaggtttaaggtgtctcatgttcatctgagatggaaagctttcttttttttttcctcctttgaaacagggtctcactctgtcgcccaggctagagtgtagtggcacaatctcagctcactgcgacctctgcctcctgggctcaagggatcctcctacctcactttcccaagtagatgggactacaggcacacgccaccatgcagggctaatttttttttgtttttaatagagacagggttttgccatgttgtccaggccggtctcgaactcctgatctcaagcaatatgcctatcttggcccccccaaagtgctgggattacaggcgtgagctaccatgcccttaggaaagcttttaaattttaaatctcttttgtggtgcaggtctaataggttccagggcttgtggaggtagggctagagtttgcacctaggtgtcactgaagcaggtacctgaggcaggtgaggggctgggagcctgccttccgctcttggaggcacagtttagcttggcaggggcctcagggtgtgagcaaacgcgcaccaggcaccagcatcctgttgccttggcacaaagcacagtccgtggtaaggagcaccgcgtgcagcatccccagggcaggtgtcctgctctgggaggtgcctccgtaggcctggccctggcacctacctagctccttccaggcaaatgggagtggagggtgggaaggaggtccagggaaagagagctgtgcccaggaagggctcgcactatctgggggcgcggggctgtgggtagggcgctgcttaggaagagagaggaggaggagcaggcctggagggaaatggagggaggccagccttagccccagtgctgggaaattaggagtcaagcgacaaacctcgttagcgaggagcgcgccggctgcaggagagcaattcccacccttaaactcggaggccgtgctccggattactaatttccgggggccgggcgcactgacagtgagtgtcatccatctcccccttgccagcccgcctggtggccgccagcgtttcccggccaggactcacagagcggctcgctgctgccccccggcggttgccggggtgtccggcagcgcctcgctcccctaggcctactgggttgggaaggggagtgacttccaggtgtgagcagtttggggcgcagcttgcatgtcacctgtgtgcacatgatcttgagcaactcagggcctcaacttcctcatctgtgaaacgggaccagaccacccatctcgcaatccaggggagctagatgtatacgccggagggattggccggctctaaaaagccgagtgatgcacctcccagtggccactccacacgtttttgtggttggnnnnnnnnnnnnnnnnnnnnnnnnnnnnnnnnnnnnnnnnnnnnnnnnnnnnnnnnnnnnnnnnnnnnnnnnnnnnnnnnnnnnnnnnnnnnnnnnnnnnnnnnnnnnnnnnnnnnnnnnnnnnnnnnnnnnnnnnnnnnnnnnnnnnnnnnnnnnnnnnnnnnnnnnnnnnnnnnnnnnnnnnnnnnnnnnnnnnnnnnnnnnnnnnnnnnnnnnnnnnnnnnnnnnnnnnnnnnnnnnnnnnnnnnnnnnnnnnnnnnnnnnnnnnnnnnnnnnnnnnnnnnnnnnnnnnnnnnnnnnnnnnnnnnnnnnnnnnnnnnnnnnnnnnnnnnnnnnnnnnnnnnnnnnnnnnnnnnnnnnnnnnnnnnnnnnnnnnnnnnnnnnnnnnnnnnnnnnnnnnnnnnnnnnnnnnnnnnnnnnnnnnnnnnnnnnnnnnnnnnnnnnnnnnnnnnnnnnnnnnnnnnnnnnnnnnnnnnnnnnnnnnnnnnnnnnnnnnnnnnnnnnnnnnnnnnnnnnnnnnnnnnnnnnnnnnnnnnnnnnnnnnnnnnnnnnnnnnnnnnnnnnnnnnnnnnnnnnnnnnnnnnnnnnnnnnnnnnnnnnnnnnnnnnnnnnnnnnnnnnnnnnnnnnnnnnnnnnnnnnnnnnnnnnnnnnnnnnnnnnnnnnnnnnnnnnnnnnnnnnnnnnnnnnnnnnnnnnnnnnnnnnnnnnnnnnnnnnnnnnnnnnnnnnnnnnnnnnnnnnnnnnnnnnnnnnnnnnnnnnnnnnnnnnnnnnnnnnnnnnnnnnnnnnnnnnnnnnnnnnnnnnnnnnnnnnnnnnnnnnnnnnnnnnnnnnnnnnnnnnnnnnnnnnnnnnnnnnnnnnnnnnnnnnnnnnnnnnnnnnnnnnnnnnnnnnnnnnnnnnnnnnnnnnnnnnnnnnnnnnnnnnnnnnnnnnnnnnnnnnnnnnnnnnnnnnnnnnnnnnnnnnnnnnnnnnnnnnnnnnnnnnnnnnnnnnnnnnnnnnnnnnnnnnnnnnnnnnnnnnnnnnnnnnnnnnnnnnnnnnnnnnnnnnnnnnnnnnnnnnnnnnnnnnnnnnnnnnnnnnnnnnnnnnnnnnnnnnnnnnnnnnnnnnnnnnnnnnnnnnnnnnnnnnnnnnnnnnnnnnnnnnnnnnnnnnnnnnnnnnnnnnnnnnnnnnnnnnnnnnnnnnnnnnnnnnnnnnnnnnnnnnnnnnnnnnnnnnnnnnnnnnnnnnnnnnnnnnnnnnnnnnnnnnnnnnnnnnnnnnnnnnnnnnnnnnnnnnnnnnnnnnnnnnnnnnnnnnnnnnnnnnnnnnnnnnnnnnnnnnnnnnnnnnnnnnnaaggctggggccttcagtccctctccgcgccgcctgtgggtgcccaggaatttcaggacgctccctgagtcattccagtcaagtgcctgggtgaggtagggtggggggtgccaggaatggggaggcgctgcgctggggccagaagcgcaatgggtcgtgccagtttctggaggcgggcgacctcgcctctgaccgcaaccccagctacttaatgatccccctggcgaagcggcgcctccgtgggttctccagcccctgggccgcgggttctttaaagaacaccccccgcagcggcccgcaattgtggccttcccaaaagttacttaaaactggggggtggggtgccttatggaattttgaggccaagttcttagtattcagccttttctagttggggtaataaggtcaggcatggggggggtggggcttgggtacacagtctgttttgtgtcgcctccccccaccccacgcgccaccagcgcccagaaagttgttctccaaaaggcctccaggacacggagttacccgtccgcccattattgggcctgctctgtgtcaggcactgttctaggttcccgggacgcagctgcgagacagggctccgctcacgtggcgagggtgctgcactactttaagagtcaagtggccggtcttagccaccaaggtccccgggacccccgagcagtccagccaggggctcccgagagtgtgggggtggcacctccgcggccccgctggtgtccccggctcacctggccggccgggccggggaggggcgtgtgcctgggcgggtggatccgggcgcccgtcggtgcgcgcgcgcgcgcctgtgtgtttgcggctgaaacccgacacctcccgctggctgaggtcagggagccgggagcgagccagtggcccgggagtgggcggcgttgcgtttgggtgtgtcctcggcggcgacagcagcaggtgtttcttggccggggccccggaagctccacctccccagcgggcccgagctgccgccgccgagcagccccgggtgagataagcagtttagacaaacactgggcgacggtggctccagcatgtatcagccgaggtggagctgcggggccctggcatgaaaggtgagcgcgccgcacccggccggggacggggtcctcccccctccccccaccgcactgtcctcctgcaagttcgcgggtttcgcgggggcggccgccaacggctcccgggcaacttccccggagtgttagcggcgataagagccgggagggcgggcaggcgaccaaaggccacccccttcctccgcccgcgggtcgcagcctgggaggcctggctgcgggcggggactcgggggctccgggctcaggagtgcgctcagcgggggatggggggggtgcgtttaagtgcgtgcgggctagagggcaggtaaagtggggggatgggggtggcggggggagtctccgagagctgcgggcgctggagagctggaatgaaaactttgcggcgacgcgggagggagcgaatgggggtggctgtgcgcccccgcggcaggtgctggcgacggccgaggnnnnnnnnnnnnnnnnnnnnnnnnnnnnnnnnnnnnnnnnnnnnnnnnnnnnnnnnnnnnnnnnnnnnnnnnnnnnnnnnnnnnnnnnnnnnnnnnnnnnnnnnnnnnnnnnnnnnnnnnnnnnnnnnnnnnnnnnnnnnnnnnnnnnnnnnnnnnnnnnnnnnnnnnnnnnnnnnnnnnnnnnnnnnnnnnnnnnnnnnnnnnnnnnnnnnnnnnnnnnnnnnnnnnnnnnnnnnnnnnnnnnnnnnnnnnnnnnnnnnnnnnnnnnnnnnnnnnnnnnnnnnnnnnnnnnnnnnnnnnnnnnnnnnnnnnnnnnnnnnnnnnnnnnnnnnnnnnccgcctggatgcgcctccccgcccccagccctcccgggccctgcggccgcgctgatgggcggcgagtggcccgaccgagtggagccgattcaattatattgcagcaccagagacacctcctcggccgcccgcccgcctctctagcaggctaattaaattcccttcatggaggcggagcgggagtggagctcaccctccctgcgcccgcccacccccagctttccgcctcccctccccagcgccgggtgggggaccaggggggcacttagaaatgtgcggtggagactcgaggcgcaggccatagggagggggttcccagatggggggaagggacaccgcgacaccctcattagatgggggagtggaggctgcgccctttccacgtggtgggccgggggcctggccgcagtgcccgtctgagttccgagggcagcgtgctggcggtgggggagcacctgccgggttcccagctgggcggtggatgccagccggagttgagtcggtttggctcttacaaactagcctttgtacaaagtgcgtttaaaacacactaaacccttgctccccgctgcggtgccttatctggggcctgaggggtagcggccacacaggttggggtttggaaacaaaaagcggggccaccaaatggaaagagggctccttttgtaaaaggcgcctgaacaaaaggcccagccgcactccgggtggaagcgaacccgcctaagccgatttccaggcggcgggggacaaaggggcagagagaaggtcttggtgggggcgttgtgaaatgtgccccctggtcggccgtctcgtcctctcctctgggattccgtgctcccgcctcccggcaggggtggaagggggaacccaggtgagcagccttccctggcctccctcggtgttgcttaagcttggggcacttcagtgttgctcaccctgtgtttacggccgcctccaccagcagggacggcagaacctgaggcacaggctgtgcctgactcagccgccacgccacaggtgaggggcccagggcgcaggctccgacggcgaagtgtgtcatcccggccgccggctgtgcagggagtcgccccgcccaggtagattcaggagcgctggaagaggccctggcctgcgagagcagcgacctcggtgcttcctaagagactttccgagacagccagccccgtgtcggcagcgttcctgatctcctgcgggccgggtgcgaggatggcttttgtcactctggcagcagacaccaaagtcaggaggggaagctggggaagctggagccaaccacggttttgacgcttggagttttctttcctggagccttgggggcggtgccgggccagagctggtgagagcccgccaggagcctccggtgacctagggtcagccctgccttgggaagggaggtcgggaagtcctagttctaggcacagtgaggctgagctcaaaacaaggaaggcaacaaggtgtccactgtggcgcaggctctgagctgtttgggacagtttttaggatcttggagtgtcagagttcaaaggggcttgtacatctccaaactcggtgttttaaaactgctgctggccaggcctttccaagcccagttaagccacagcctctgggttcctgacccgggtctgggggttgtcagagctccccagctgatcctaacgtacacactgggggtaggaacaaggggcaaactgaggcttggggccaggcgtggggcggacaccgcgctcacagcaggaagcctcctccgatggccccgatgagccctcccctccagcagtcacttccctgtctctgggggaagttcaggggctgcagatctgagtgccttgtggtttcagagcagaagccaagcctgcctgtgggctcagcatcgccggccccaggaagagccaagtctgcacagcgccactctgtggcagaccggggtcctgcacctctgagctagagattccccccttccaacccctggagtcccaaattccccttgagcccctggagcaggtactgtctgtcctcccctgctctgaaggaggcggactggggggcctttgggctcggagccccgagctgaggggcaggagctggtgcctcccacttttctggaagagtgcggataagctagagggctggctgctaccttttccctgcctccaggagctcgcaggggcttgtggagtcggctagcagggccggtttttcctggccccatttgaagccttggaattcccagcctgggttactcgaagtccaaggatcaaaccctgggatcgggccagggttggatggggaccctctctgggtagcctgtgaattgtctctgttgtggcaacagcagggtcctctgaaaccacagggcttcccctccctttcctggtgtgccgggagagctgtttttttaacctgcagagatccatgttgcaggtgacatttcagcttggtggctgtgccgaagcctggccgcctggctttaattcctcccccagtggagtctcagatctcggtggcctcaccgagtgcggtgtgggacgccgtgctgctggcttcacttccgcatgctggcctttctcccccggctgaggccacagcctgggaggtgacgtttcggagtgtcgctgtcaatgagaatttattgagctcctcctctgaatccagccgtgtgcttgctgctgggaggtgtacagacagataaaacaggagcgtggccaaaagcagccctttgcatgcctgccaaacgcacactcgggggccttttaatcttgcttctgcagctctgattccccaccagcctcttctctcacgccctcagctccagccagacgaaaccacacgccattctcgccactcctgcgtttggccacgtccctgtcctagcatgggccatcccgtctgcctgggattctcccgtctgctccaaagcccacctgtcactgaggccagtccacctgcccctcctaacctgatgcctccctcgcatccatactcccatgcccaccccgtgtctggaatcagaagttcagaggggaagtgagagctgcccccgggaggctggggcggagtccaggcctggaggaaggagctgtagatgagggcagggctggtgctggagagggcctctggtttaccttcacctgcacctaccagtcatctgtggaaagaaggggttgggctgcacttgaggcttttgtgggtccttgtgacttgggggtttctagggaggcaggtggaggaagtggggagcctccagctcgggggtctctcctggctgcacttttgaatcacctggggagctttaaaagctcccagtgtccaggctgtactgccaggcagttcaggccaaatctcggagggatgcagcctgggcatccgtgtgtcaaccctcccccccccccccggtgactgccacgtgcagcccaagctgagaccctggctctgctttcttccagagcagcttcctagtcacctaggggccagggtgggagcttttcaatgcttggcccccctaatccagaagggccttctgctggggggagcaatgtgggtaggaattccttctcctgggaagatgggctgatgctgtttcaggagacctggggtctctcttcccacctgggaagccagagaccgccttgcttgccccggaattggatggagaaccctggtgactcagaaatggacgtctcccctctacgccacctcccccgcaggacggcgtggcacctgtcacctggctgctctctggatgtctgtgggccttgtgttaaccccaggcagaatcctgaaggtcattcttgcctggcccaggtgtgctttgagctcttctaaaggggcttacaaatgcagagtcccactggcatgggtggattcgtgttcacctgcatctctagccaggccttccaattctggaaccggttcctccagctggaggacttgacgtgtctgaggaggtgtgtgtaatagtggctttgggatcactggactgaggtggcgtgaggggggtgcgtgctaatggtgacatagatccttccactttaatcatcacgtcctcacccccacccccatgttctcatctgtaagacgaggatgcagaggccctctggcagttgagggtgaggatgagatgctgtaatgcccgccacatgcccctgacgggtaaatgacagatgcgggtgagggttgagaaggcctggagcgtggggtgagcccctgatgagtgtcagctgttactgtgtcgatcagtgcatctgactgttcgtatctgcctcttgcttagcctgtgtgacctcaggcacttgtgttctgggcctcagtcttctaatctgtggaataggaatgacaatgtcacctgtatcctgaggctgttgagggttaaagcctttattaccaagtgcccagtacagcacctgacacaggctctgcaaagccttgcggctactcctgttgctgttgttttaattagagacagggtcttgctctgctgcctaggctggggcgcagtggtgcgatcacagctcaccacagcctcaaactcctgcgctcaagtgatcctgctgccgcagcctcctgagaagttggaaccactgatgcgtgccgcgacacctggctaattttaaagaaatttttttgtggagacagggtctctcactgtgttgcccagggtggtctcaaactcctgatcttgggtgatccttccgtctcagcctcccaaagcactggagttacaggcatgagccactgtgtccagcttggctttaatttataaagttccaaggctctgttcccctacgctcaactgactcccttgcggtgttgggggtggccccttttcccaaaaagactggagttgctttttctgccctaaggctcaagtcaccacagcagaccctgccggcccctctgctgggctttaacaaccggaggttctttttaggagcctcaacgtcccctcgggctcacatgcacaccactgcccccttggtgattggcactctgggcccaggtggcgggagatgctttaacaaactgtccctcccccagccctgcccttcctgcgctcggatggtgggtctgtggccacaggcagcaatgaagggtatcgaccgcccagcttttggttgagcagtattgatgttggacaggttaagccgtcccgaaggaaaatctatatgtcaagctgagcacaagacagcttgcgagtggaggcgggaggggggtggggcgcagccttaagggccacttctaggctaaccctgagtcttatcttctgggttggggggcaaagcccgggggtgccaagcgatgccccacagccccagacgggcctggagggacggcaggcgctcttacgtggtgtgatctgtgggcagatggtgtgccggccaggtcttgatcccacttaaggagttgtctctgggatttagtaaccagatgggaaagactgtatttctgtatccagaggtgctgtggctgccccagcctatgagggtcacgccgtgggctgtgcgtcaggcgtggtggggggacgttttcaccccaacgtgctcctcctccccagggagggactgacttgctaggcagggattatccccatttagccatgcaccagggaagaaaggggccccggggatccatatcctccctgtagtcacacagctggtaattaattggtagaggagcagaaacccacaccatgattttcccactccagcctcctcacccaactcccacccgctctcccttagagcctggagagaggtcaccggctgcttcggaaggccctgtttaacctgggctgcttatggggtgcggtggctcaagcctgtaatcccagcactccaggaggccgaggcaggtggattgcttgagctctgcagtttaagacctcctctctacaaaaaataaaaataaaaataaaaagaactggccaggcttggtgggatgcgcctgtggttccagctactcaggaggctgggcagggaggatcacttgagccccggagctcgaggctgcctgcaatgagctgtgatcgcaccactgcaccccagcctgggtgatagagcgggactcttgtctcagcaaaaaaacaaaattaaactgagctgcttcacccagtctcgggatgtgagtggattcttccaactgaattcccagtgtacatttatctttgagtgtatttttgtaatgtttttgcatttgacatgtggtattttttccattcacttaaatatacgaggatccactagacagccgatgctatactgggtgttgaagacacaaagtggaatgcggttcaagcaaaaattctcagccagatgggagcattggagagacttccgcctcccagaggctgccgatccacgcggtcgtctctgccgcccgtcgggagggtgcggttagtcaccccgtaacagataagaaaacagggtttcggaatcagcccttgtggaatgcctgggctggcgccccactcagccctgcatctctgagctgttggggaacccgtttagatggtctcagccttgggtctctgcactgttctcagccctgggtctctgctctgttgaggaacccgtttagagggtctcagccctgggtctctgctgtgttggggaagccgtgtagatggtcttggccatgggtgtctgctgtgttggggaacccgtttagagggtctcggccctgggtctctgctctgttggggaagccgtgtagatggtctcggccatgggtgtctgctgtgttggggaacccgtgtagatggtctcggcccggggtctctgctgtgttggggaatccgtttagatggtctcagccctgggtctctgctgtgtgggggaacccatttagatggtttcagccctggatctctgcactgttggggaacccgtgtagatggtcttggccctgggtctctgccctgttggggaacccgtttagatggtctcggccctggatctctgcactgttggggaacccgtgtagatggtcttggccctgggtctctgctgtgttggggaacccgtttagatggtttcggccctgggtctgtgctctgttggggaacccgtttagatggtcttggccttgggtctctgcggtgttgggggaacccgcttagatcgtctcttgaaaaaggtttgtgtccaccgccccccgtgctggggtgtgcagggagtggagtgtgcgctgagatcgtatctattttaaatcaagccgatgtcctggcgtccttttttgaatacagtcttatcgttttacaacgtgttgtttccacctaaatgtacatcttataagactttataggactaaggaagttaatccatccttagcagggatgccagacccctggagcctgtcacctgggcacagggaggacattttaactaagcagctggtttccaggttgagactggttgggatcctgcggagtgactctgaatccactaacagcaggactgtgtctgcttggatgctggagctggggtttctccagccacggctggcagagtggaccctggggttttgtgtcatccgtgtctcttatccactggagagactgttgtgttccttctgccagattacccttgaagaagcaggggaggggagggcgctccggcccacctctgcttacctgcccacctcgggctcattcttcccaccccatactccccatgcagccttcaggacaggagacatagcctggactacttctcatggcgcaacaagaactttgttaccagtcttggtggcagagactgccagctcccaacagccaggtctgcacctgactgggaaatttactagttcctcactgggattctggaggggcgtgtgtgtgtgcatgttgagaattacagaatcatttagacttaagcagtcagccattcagcagttgacaggatgattgtggccggaaaaggtgaccagtttgtcctgtttggtggctgggttggatgagggagtccaggactcctggcgcatgactgttatgggagcttttcctggacagctccattccaaagtccatcttggctgagggtgcttgttggttttttccagtgaggcatttagtgatgtctgggcacagcacttggggctttgaagatgggagacgagtctggacgaggaaacgccattagaacgtggatggttctgggccctttctttttccaccctgtatttcctctgtccaggcaggtcatattggggagggtgttcatactcgtgggttgccacttagggaactctgtgctgtaggagtttgtagcctgggttcatggatgctacacatcttcaaacacacgctcccacagggtttacagataggctcttcgaacttggtaaaactgtatgtaacatgcagtaggtgtattttcctggggagagggtctggtccgccactttgaaccatcttgagagtggacctttttgcaaaggcggatgtaactgttttatgacttgaggggcaagtcctgacttggtgagcttgctttgattcaggggagacctaccttggggttgacacacgccagaattgtggccttcataggcgtcccctgaagctgagcctgggaaggggttgacctctttctgttacaccctcatggagttaccgtgtcgatgacatctgagtggagtgtctgtgctgagggttgcagctgcagctgccgcagggctgttagttgctcagacctgcatgtacttggagaattgggaagacctggtgttgaggaagctggctggcctgagaccatagggaggggaggggtgcagactctggcaacctggagagttagggacaaactaagggagaagtgccactcatggggctgtggtttttatggcttagacttttcgggagaaactgggcaccttctcgttgacttgaagcctcctattttaagacattgcccattgattctcgtttaaacaacacagcgtgatttcaggtcaaataaaaacaggttgaagggtaaaaggctggccccttgtccactcctttttttttttttttttgagacagggtctcgctctgtcacctacattgcagtgcagtcgcgcaatcacaactcaaggcagcctcaacctcctgggctcaagcgatcccccacctcggcctcccaaagcgctgggattataggcgtgagccactgttcactgaccctcttgtccaatcatttgcaccctctctccatggtactgacagggaaactgaggctcaggccatgcggtgccctggaagtccgcactgagctgttgggcatgagtcagcctgggcccacccccgttccccttggttttccagctcaggaccaagccctttttgctctgcccccatagtgtgttccctcgaggccccacagctctcagccttcagtggaagttcaggctggctgagtgggatgtgaggaccccggtgcctgcaggcaggcacactgcgccttctgacttaaaggcgcccatttctgctggtgtgggcgtccgccctgttggagggaagggacgttttccagtcatcaccatctccccgcctctgaagctggagaccctggacccctcttcgaaggccaggtggccctttctgcccccgcgccacctcccctgctgcccaggccactcctggcccctgtatgattgcttctttgagcacctgttggtgtccagctcctgtacggcctggtccctgttcttggctgtagactaagggccctgtagataggtactggcactcactcggtacagaagggacaggcattcataggagacgtccttggatcctctctccctcccacttacctgagggagcttgttaaacactcagcctcctccacactggggagaggagaggggcctgcatttcgtgggtccttgtgagcaagcgtctcagcctcctcttcctgctggcccatgccccccggccgccacccgccgtcccacggaaacttggagacctcagtgcccgccctggggtgggggagccaggttggatttccctcctgggcacctctcacctgcctggacaccttggacctcatccgttcctctgcccagggcctctggagggaggaagggctcccacaggagcaggtgcaatggaaggcagcctggtcagctctggtgccatgggctacacagggcacccgggggcggttccggcctctagcacaggtgccctctggctgagagctgtgggaaagtggggctgggggaggcctcgagtccagagccttcctattcccagccgtgtaggtcccgtccgtaaaacgggtatagcactagggtgggcacccaaacagccgccacagggtgagagctgccacagggaggggaccccaagtgacgccagccatttccaatctcttcgcacattaaagggaagcagccggcaccatggccaggacagctgggtttccttccggctcctgagcctctacatgtgacccgggttgagggcgtgaatctccagcctccgttcagcctctgtaggctgggagtgagcatcccactgtgtggaataaacaggtggagagaggcgcctgggcaccgccaggaccactgcctccgggaagcagcccatggggagaatgtgacaagggaccccaggtaccgccaagggcacagggtggcggaggggctgggaatcggccggcatgggtgagcccccggctctgtctcagctgagctgtgtggccccagcggcctgtgtcactttgctgttcgcagctttgctttctggggtctgcttacgtaaagggaagtaagggtacaggtagccggcgccctgtaaaagttgccccctggtaccttgatcgctgttggtgctgggcaccatctcccagagtcacagctctggacaccgaccccagccttgactcagggccccgccctctcccttggtctgtcgtgcccctttaggaggccgcctccctgccgaggccaggctgccgcccgcatctgccagtcccgcccttcccgccgccctcctctccagcccttcatctgcccggcctgcttctccgcacacacagcagccgcttaggataatcgcgtcaaatgttgctgccatctgttgcctgacttcccgtccctcgcctccatccgggaacctccgggaccagtccgtggccgtgaacctcagtcgcaggaccgtcggctcctaggaggctgctgtccgcgggtccccagaatgcaacctcagcatccagcgccttctgtgcagagcccccctgctgtcctcaaaactgtagtgtggcgtccaacctgggaagcccctccaggtgacctggccccccaggtgacacccctgggattgacctgctcccttgcactgtccaatgctgttgtgtggacgtctcccgagagctctgcaccccgtgttcttctgcagaacacggcctcctttgtgttcccagcatggcagtgagcaagagaaggctggggagaaaccggggtggccagccccctccccgtcacccccattcacagcaggactgcagcttcaagggtgtcgtggggctcgggcagaatatggggttcagggtggctgctgggggccctaggcattgcttgggagatggctcattgcgggtggctctacgtggttgaccggggccctggagggcagcgtctgggggctcctgccgtggctcagtgagcgtggcagaggacaggtctacacgggccaggcgctgtgttgctctttcctcctggggtagggactcctgtggctgcacaggttgcccccgcccacctgcttgtgttttctcagcccttcttgttccaggtcaggatcctggccacctgcaagggctgtcctttgccttagccatgagtgatggccctggccggtttctggggcatagaccttgggaagcaagtccagtatggggacccagggcagcctgggggggtgtttttatttggaaaaaaaaaattaaggcacaagcaggctgcccccatgtgtctggagcaagaagacctctccccagggtctccccgccccctcccttgcctccacccccaagaaaaattgctttgtgccactgagcttggagcacgtggagggcagatatgataatgaatttatcatgaagccgcccaggctcctgcgatcacgtggtgcccgtgcagcctcagccgccagggtctgtagcagggtgacccgacctcgttagggccacggaagcttcgcccctttgggggagtggggatcgcgggggcgggcaccagtccccgagctgggggacgccctttatttgttcacaaacatttctttctgcggtaatgaaaaattaccaagaggggtgattagagaatccaggtccagattgtgtgtgcggggcctgaaagtgaaggcctgctgggcccagcctcacggggtgtaattaccccacggggggctgtcagggggaaggggcggattggtgcttgaaccgggacccagcagaaaattcacctcagctattagcttgtaattacagagcacagagggagcaggcctgaggtctggtgccggggaagagccgggatgaaaggaagcagtaattacgggatccgcgggaggccgggagggcggctggcacgctgattaataagcccctccagcctcgtggggagggggagcgaggaatgggacaccatatttaatggagtagagaggcctcccccctcgtttaaatcctgctgttggagcgtttggacagcaggcagaccggtttggggtctgttctgaagaactaagaacgagatgggttccggaaaatagcagctcgctgggccagccagccttgtccctctccactgggactttgcttccttttcttcttgccttttttttttttttttttttttttttttttttaaagcattgtgctgcttctgaccctattagaaacctagccagagaataggagaaagtattgattcaagaagcggtgctttgttacggggggcggggggtgggggcctcacccgggggcggtggtctttgcttccccagacctttcctgtctgtgaaatggtgggacctgagggttttgcggtgctgtgggctgctgcttcattctccgtttcctgccctctggcttctggcagaagcctctaggttctcagctctgccaggcagactgtctagaccaggtgggttctttctgaaagggtccagggagcagacagttgaggctcacatgaagaaggggtatgtcccctggcccctcagtttgagggtgcccagggccgaggggcctttaggtgtctggctgtggcagctttttttttcctgggggtgggggtcaaggtggcagctgacagtggcaggaagggttgtccagagcagcacgtgatgtaaataagagggtgggggcctcgcagacctggtccacctagacccctggctcgttttcgcctgctgagctgcacatgtcaagagagcttgtacagtgcggagacagcccccggccccccggccccccggccctcatccgtcacaggccttcacacggtggagcgtattcccagctgttaggataatgaatttacatgagctgataatgtagacaagaattcagtcaatgtccaggagcgcagaagttaataaatacctctctaatgagggcagcaggggggtgtgctctcccagggcctccctctccccgccatccctgtgtcccccacggacaccttggcacctgcactgacctcagccagagaacacctgcacgggaggaggcccgcatcggtctccctggggagggctgggggcttcgtgccgaggcctcgggggcagcagccttgaagtgatccccaccaggcctggaggggcaggaggcacgtgggccctggaggctgtgtccattcacagcaggcccagggggacccctccaaggatctcggggttccccggctcttggcctcctgtcctggcctcaagggagctgcgcccggctgctgcggcccccgccccgcctgcccagtgcacacatactgaggagcagcgctaattttagattccccctaatgaagccgctcatttggaattctattttaagtgacctgacatcagcagagccgcttcccaggctcacagctcctcaggagcctgcagctgacaccggggcagggatgctgcccgcaggggacccccagggacccagggagactgtacctggggctggagggggcccatggggcccggggagcagatattgggctttgtcagaggccggggtagggaggttgctgtcaggatgccagtgggctggtgatagtgacactgaggtagcctcagacccaggcattggagggagcaggcagagggcctccctggtcaccagggaagggctggggagctgtgggtgagggctcaggttcagactcctgcagggacaccccagttccctccacctctgccctgtggctggacagccccacgcttttgttggcggtgctgacttcgtgccgtcgagccgccatccctttgaatgtccgccttttaaaagcctggttcactgcagaaaaattagaacatacagagagagaaaaaggatgaaagtgaaagacatagctcttctcgttgccatctgaagacactgccagtagcctcaaggtgtgtgcgccatctggggtctggtctgggactcgcgccatggcctctgtgtaccactgatagggtttggatgtgtgtcccctccgaatctcatgtggaaatgtgtcctccagttttggaggtggggcccagtggcagtgattggatcatgggggtggatctctcatgaaggggttatcaccgtcaccttagtggtgagcacgctctcgcaagatctgggtgtttaaaagcctgggacctccccactcttgctccctctctcaccactggatgtgctggcttccctcgccttccgccatgattagaagcctcctgaggcctccccagaagcagatgccagcaccacgcttcctgtacaccccacagagtcaggagccaaaataagcctcttttctttatgaattacacagcctcgggtatttctttatagcaacacagacagcctagttcagccacccagcccgtgcctgtggctggtggtcatagcacatctgcccgggtggccagccagcctcatgaaggccacaggagagagaattggcatctgctcccagaccttcagggcgggtcacctggaggtgaaatgaccatacggtgccccacgttccccttttgcggtagcatgtggtgtggtttgcagggcatagtcagccacccagcctgcaccggagatcggcccctcctgcggccctggagcaggtcgagctgggccctggctggcttgtcacatgggcactgtgctgaggtcatctcagccctgctctgcactggacctgggctccaagcctgccttcgcctatctgggaaataggcccagtcccagctttctcatagggcggccaagatgtagagtggctggctctctgaggaatgtgggaaagggggatgggggatgctgatggtctctggcatcgaagggacatgttttggagactctgggtgaagatgcagagtctctgtgtgcagatagtttcacttcttggctttctgatggattgagggggcggcctggattaatagagggtgtggtgatgctgaccgtatcagttatctagcgttgtgtgaccaactgtccgcagctcagtggcttaaacacaaaacctttgttatctcagtttctgtgggccagggattggaggatggcttagctgggtggttctggctcagggtctgtgatgagcctacttgagatgttggctggggctgcggtctcatcagaaggccagcctggggctggaggattcattgccaaggtggcttctcacatggctgttggctggaggccttggttctttgaaatgtgggtttctccatgacctgcttgagcatcctcatgatacggcagctgacccccctccactggagtgacccaagagggccaggaaggaggtgatcttaccttggcagctgcagactgctgcttccattatactctgttcatcagaagtgagttgctcagtctggcccacgcttggggaagggaattggtctctacctcttgaaaggatgactgatgaggactttatagacattctttttattttttgagagacagggttctgttacccaggctagagtatagcggtgtgatcatagctcactgtagctccaactcctgggctcaaataatcctcccaaacagcggagattacaggtacgcatgtgtcgtttcagggtaatttacagagacagcgtctatgctgcccaggctggttttgaactcctggcctcacgcagtcctcccacctcaccctcctacttacctgggattacaggtgtgcccaccatgcccaggatgaatgtttttaaccattacagttcaacgtatcttagctgtgtgtggtgcgcgcacatgtgaccattcacgccttctgatcgggtgccatggttgggccgtgtactgggcaggtgctggtaatgagcagtgggggcccaggaagccgggttcaagtcctggacatgctgctcaactgactgaccttggaccaagcttaggtcatctcctggtctcggtttccccatctgtacgctaggcctcttgggcttgggcgatggctgtgaggggtgggacacaggctgggtggtgggtgacagttcagctgctgtggcctctcctgggctcattgtgaggctgtcttgagaggtgcccgactggtctgtgtgacttctgagagctgctgcagtatcccctgggggggtggtctttgcgttccccggggccctgctcctgtcttccaggcagctctcctagcgtcaccctcctgagtgcctcgttgggaccacgaggacctggttcattgatgtccgtgtgggtccctgtgagggtggggctctgtcctgtgccacttcgtctttctagacattccctcctaaaaacccgcagcctactcggtgtggtgctgaaggtgcttcggtgacagataggacccggaggtcctctggactgcccatggcagcccctatgttggccatgtcctccagtgtcccctgcaggcaccaggacaagagctctggtctcccccatcctccagtgtcctgtgggtcaccttttcccggccaccggccttttggggtcacggggtggccctctgccgaaggtgtgtgggctcgtgggcccagggcacggggcttgtgggcagggtgcctgccagcttgacaccatgtgccctccccattgtggctccagtggggtgagcatcgcagactcagagcatgggtcccatttgctgagacacctgcgtggccttggctggaccccctgcctgctgggactggcatctgcctgctgggactggcatctgtcctcgctggctggcatgctgtctcgtaatggccctggggtgccccacaggctctgaagcccctcatgtcagttaccccattatgctcaggggagtgacctcatgaggtcagctttgctgtgctgttaccccgtttggtagatgaagaaaccgaggccctgacaggcaaagtaacttgccccaaaaggttgttcagccagaagcatccagaagctgggtctgagccacaggcgcgttttcatcgcctccaatggacccgctgcgcctctgtgcacagggagaggcactgatggcagcccggtgcgggggacacgcagaggccaggcccgccttgggggcagcgtggctggcggtgcggagcagagagcagctggcagggttcaggctggccgaggacgggccctcattggcagcccgcattttctggaagtgaggctgccaggcagagcccccgccctcccgcttgtttggatgtctgtgccgggttgaagcggccttggaaaggcaggatgggggtgcaggtccccctccacccctggcccctccagaaagagccaagggaagacaggctaggtggggcccgctgctgcagggcacggccacggcgccacctggctgttgcctgccatgggcatggggctctcaggggtcctttgttcccaaggtgtgagctctcactggggagaacaaacgatgccccccgaactcgttcccgcctctctgttctctcatttgcagccccctctctcaggcagtgcccccagcccttccctcagtgcccccaaagaattattttctccctacgtcccctctatcaggagagggaggacttggctccctgaatacatggccaggactcacggcctttggtggcaagttctggggatagcaggtggacaaaggaggtcttgagggggtcctctccacgctgcctccgagcctgctgtcccatggggacaggttccaattagacttgtcaatgtcacttagaatctggcagaggtggagtgggctctggaggccagggcagcctcttccggggaggaacctgggggcccccttgcccttaccccataggaagtgcacagtccgcccctcttgtgtgttgccccccggatctctgtgacaccagccccaccatgtgtggccccagcgcccccccgccccaagatgcatccacagggaggaagccgggaccctgtctgtgggtgatgtaggggtgggggcgtctctgcgggggagggatgttggtggaaacattttgaccaggttgggcttttattgattggacacacggggtgggcggactgagggcttgtttggaggtggccatgtcctttccccagtggttctgatgtcaccaggtggctgcccctgggctcagacctctggtgccgccgccgccgccgccgccgctgtcaccactggccgggagggccaggtcagccgttgctgcgccaggtcggcctgaacttggccctgggaggaaagagggttccaagctgcaccgcggtttggatttgcggttttctgtttttagcatctccgggcagactctgtgcccagtaaggggccacagtggggtctgcagtgcggccgtgttcttccccaccgctccctgtcagcctgcctgtgtggccccatctctgggacccctctcagacagagacgcacagggtccctgagtggcggggaggccgggggtctgccctgagtgcccgcgtggactgggccgagttggggccttagtttccttttctgtaacgtggggcagaactcccgccagtcttctgagggcattgccatgcgtgcctggcatcgtgtgcttgtcgcgtcagtggccacagcagttgtcttggttcccgtcgtccctgggcctctccaccagcgtgtttctatcctgaggatgcgggccgcacgcctcctccgcctgggcctcagtctccttccccacgccatttgatggtcaggggcctgttgggtgatgcgtgggatcctccacgacctgcccagcctggactgccctggagaggtagagggacagtgctggcccaagccgttcagcatctggggtcctgggggcctcttgggtctgtgccgggttccagctggactctggggacggggtctgttctctctgcagcgctggctctgtcctgttcttgcttgtcctgctggagcccccggggctgcccctgctccctgcctgctgctgctgacaccggccctgccgaccctgctctggtgctgggcgctcctgctctctgggtgacctctggttcttcttttcctgtttcaggcatgagccatgagcccaagtccccttcgctagggatgctttccaccgcgaccaggaccaccgccaccgtcaaccccctcaccccctcgccgctcaatggcgccctggtgcccagcggcagccccgccaccagcagcgcgctgtcggcccaggccgcgccatcctccagctttgccgccgcgctgcgcaagctcgccaaacaggcggaggagcccagaggtaagggggcccgccaggctgcgcgtggggggagcggcggctcccgaggccgggactcagcctcccgcctgcggcgtgcacgctcacagcaggtctcgtctttcccacgccgtgtgctctgcatggagcaggcagtgctggctgagctacagaccctgggccagtccgcctgccccagcacctccgctttgcctctgtgcttctgtgtctcctgcctctgtccttcctcggcccccggagccactgcaggggtgtccggatgtagcgaggtgctcctaccagctctgtgacttgattgggaggagggtgggtgccctggaccaggggagccccaagaggctgcagagggagagctgggccctagtgctccccaagtggctccttgcccaggttttgacactccctccagaagtggcagagaacatggtgtccctggaaacacagtggtctggagcgggggtctctggcacagctgaacccaccactgctcaactccctgaggcagagactgtggggagcatagacaagcggcccccggggtctggagccttggcttctggtatcacctgggcaggacctgctgtgtgaacctgggcacgttgctgatcctctgagcctcatttttcctgtctgtgcagtgaggctctaaagacgccccctttggctctggctctggggtactttttggcgcctgcgatgaccattggcaggggctgctgctggcacaaatggggaggggcagtgggcggctggagctgctgggggccttggccatgtggattctggcctcggacaccctctggactcgctgctgacaggcgggggggctgaggaaaccgggaccccagtggcatccgcttcattcacctccaaggcccacgggttaagatccgggtgccagggccctccggggtggccacagcaacacatgcaggagccatgtccgtctttacattacccgggttccagcttggcagaggggacacctgccctgaccagggcgggctggggggacttctcatttctgaatgtctccttcctggatcctttctgctgctgctcgttggagaatggggggagtgtgagaggacacacctgacattgatggatggggggtattggcccaggagggaggcccgttggggtctggtttccgtaccaccagggggcagcccctcgcctcctggctcttcctggcaaaccaggcacaggcaggaccgccagaaaaccctccacgcccttggcaggggagtccctggccacacctgagcgggccaggttgcatgggccccacctgtgtcaagaggccggacagctgcaggcaagatggctcagggggaagcagactgcctgcctggtggaggcatcctggactctctggggcggtgaacaaggcagctggggacagaccctgggaggaagctgagcttggagtcgagactcgggctctcctgagaggggtggagagaagcgaggtcagagctggcccagctcctgctgctgcagttgtctttttttctcagcgtttgggggcaggagaaccagggctggtgagggatttccgaggccacgggcggcacgtgactggcgctggtgctacctgggctgggttatccttgcatcctgctttcatccagcagctgtgtctgctttggggcctctgggctccacccctgggtaacgctgcagaggacgtggtcaggaaagggcaggtttccctcctcgccaaggaaggtggtagagaggtgttcagactcgccttccctccctgggcccagcagcggccgtgggcgtcacagcaggagcctgctcacagggccgtcgcttcctctccgctgccccatgctgctggccccagcacttggtttggtggctcggccagcgggtggcctgagtgccagaggccgctggtccccactggccaggaacaaagtgccgctgggcgcccctggcgggaggccagacaccatggcctcgtggccctgctccctcccagctgcaacctgggcactgggaagggtcccccatggtggatgccccccaggaaagatgcccccggggtggatgcctgggaactgaatggcagagggtcgggagagcgggcgagcagtgccactgcctgagccatgtgcccatcggttcactcacccacctcaccccctattgagctgggaatgccaaggtttgtggggctcggagtctgcggatgtggagcagtgtttgggtcctggaacgccctcagccaggcctgggccctcgtcgcccccacccgttttgatgaatctccagctggtcacccctgtcaggccttggtctggatggggagggactgggtgactcgttcctcgtgacctcagccactcagtgcacctggtccccattctcatggagtcacccggaccctgacctcacgtttccccgtccatggaactggccggcagccctcccgggaccctcgggcagctgagaaggccaaagttcagagaggacaagtcgcaagacggcagccacagcgggtggggtcgtgtccgtgtcccactgctgctgggccttcccggggggggctgggagagccgccgttaggacagttctgagctggtggtcccggcggtccctgctggaaaggaagcccccctcacccctagcaccactgccagtggagcagggagctggcgttgggcgcacaaaagggtctatgcctggctgtcagcacgctgaccctgcctccctgtgggttgtggagtcctggatgacagtggggacatgtggaccccccagctcccctgtgctacccccccagctccctggtgctacctccccatctgcgccagagggcagcagggggaacctttggcggacttggcagtgggaggggtctgcatttcttatttaaaatttttttagttacaattcacatgccataaaattcaccctgtagaagcgcatgatttggtgattttcctacacagttgtgtgaccatctaattctagaacatttgggtcacccctaagagaacctcggttgcatttgccgtcagctcccacgccctcccccagcccccggcggccgctgtctgctttctgcctctgtagatgtacctgtgggcattttgtacacatgggctggcgcggtgcgtgtctggaccctgagcgtgacatctcctggtccttgtgggccatctgcggcgtgacagcccttcctgcttctcgtggctggacgacccgggtcgggggagctgggtggggccacgaacccgcagctgcctttctgctccgtcctggagttggaccagtgagggcctccccaccttcatcatggcagtggctgtgcccccttgattgcggcagtggctatgtatcgagtccccccttgatcgcggcagtggctatgtattgagtccccccttgatcgcggcagtggctgtgtatcgagcgcctgctgtgcccctggcgggctcgctgtgcttctcacacacccttcgcctctggtggatgagaactgagcctccggcttgcccgggtcccacgttgtaagtggcatggggaattccaatccccagcttgtgcctgagactccatagacccctgccccgcaggtgtagcctcctccctgcagaaagggagaccgggcctctgtgaaagccacacctgccggggagtggggtccctctggtgcctgccaggtgcccaagagagcaccaagccccagcgggctagcggctgagctggccagctcagcggcccgcagccagggctgcctcctggcgacggcacgtcctgggcagagggggcagggatggaagcagggcagctcccagagctgcagggggaggtggcaggagaggtggcagagctggcgcacccagggaacagcagaggctgtgctgccccacgcggcccctcctctgggtgccctgggccccagccgcctgcggcaagccttctcactcaccctgaccctcctctccagtgcgcgcctgacgacttctggaagtgcctctcggttttcgccatctgactgcgattgcctccgcgtctctcctctcattgtgtctcaagggtgtagtttaaaaattcaattcagacgaagctgtggcatgcgctgccctgggagaaaggctgggaaggagaggaagaggaggccctcgctgggatttatttttctggaggcgctgagacgtcttctcttcttcaaagctcagtcacccgcccaccagcgcgggccagacacccttccccagggccagcctgaccctttaacctactcacctactcactgccgaggctggggcgctttgggcaagggcagacgcttgcgaatcgccgatgcatgccccagcactttccttccttgctgtgtgatccgggcaggccgctttgcctctctgagcttccactttttcttgggtgaggagcaggtctctacctcatgaatcgtggggactgggtgggaatgtgccacagccgggaatggtggcatgagtgtcaatgcagcaggcctccaccctggctcccacccccgcctccccttccctgccccccaccctaatgctgcctcctttcaccttccccattcttgccacccccacctcctacgtgcctcccctacccctccacccactgccaccccttcccctgactccccgtcctacccctgtgacccccatcatctgccctgggagggcgtgtgcttccccggtggggttggaaggtgtgggtccgccatggcttccccccgtcaatggctctgggccgggagcctgcggtggcttcctctgtcccagtggtgcagggtgcaggcagggccaagtggctgcctgttggtcttgactttctgggagaaatggggcttggagtgcccgggccccacgcagaacattctagaaggaggctgcaggtttgggcgtgatcctgagttgatcctgggttgcacccccagccccttcccagcgaccggcctgggctgcagtctgagccgaggcgtccctgaccctgttctgccctggtggctattggtctctttgttcctcccacattgtcccagccaccaaagggacgtccccggggccgcccagccctcccttcgacgcagctgggccagctcccgctgtagcccagactcctcgggtggcaccgggtccttgggtacaagcagggacctgtcccctcctcggaatggcggcctggccaccgcctccctccctgcctctcctaccaggacctcttctgcacagacacccaaccacccccataggcatctgaaacctcagcctaggagtcccaagactggggggatgggtcccagccctgtgtcccaccccctgcgctggacagattctgactcccctctaagcctcctgggcgccaggcctagcctgccttgcgggtgtgtcgggatccccccatcatcccttgtccttggaggtgcttgttgactgactgaataagaggtgtttgccccgagggtgccccgggaacgcctgtgcgtggagccaggccctgtgcttccagctccccagctccacaccctgaaggcagccctgagccaggctggggtgtgacagctgtcgggcctgcccagtgtctctgcagagggcaggccgtggagcctccaccgccgcccccactgctgtgtgacgaagccagggctgctgccaggcaccctcgcaagctgtgtggcatctgcttgccgtgtgcagcaggcggcagcctcccgcagggacgcagcgcccgtctgccaaggcggccgggggcggaggtacggggagcctcgcgtgtcctcagctgctccaggaggcacaggcagcacctgggaccaggcaccccctccctgggaaacagttgggggcgatcgtgctgcgggcctttgctctgggaggccggcgctttgggaacagggtggctccagagccttcccaggtgggctggagagccgccgtctggaggacagttctgagcaggtgctcctggctggcgaggaagccccacctcaccccagcaccacccatggtgcagggagctggggttgggcgcacaagagtctgagcccgttcccaccccgcctccttgtcaccagcccggtggccgggactcatggcttccctgcccacacttcgctcccttaacaccggccgggggctcatggtacctgccctggaagctgccagaggcctctccaagcaggtgttggccgctgtgttacctgcggcaggggtggcccagccacccatagcccggcttgggccacagggacggggccgacaggtggtggcagtggggctggaactgctctcttgtcatcgaggcccgcggggccctgtgccgccttcccctggtggtgtctgctggctgcctgcctcgtcttgtcactggctttgcaggcaagaggggaggcagatccggttactgtcctgtccctggtgccacctgaaaccgagatcccacctgagtgagtggggactacgtgtgcggggaccacggagcagggaccacagacccatcctcatgagctgccgtgggaatgcttccaccgtggagccggcctgggcgggggagaggctccccctttctgccgctgcctcggaaatctgcctctcaaagaaaacagcaaaacaaacacggaggaaggatcccgcctggcaggcgcgcctcgcgtgggtgtcagtctgcggcggcggcggctctgcaggcgtctggagcccgtctgtctcccgcgcaggtgtgagcgccgcgggcgtcctcatggtgcctctccgttctcctggcccgggggccagagggctggtggtcaggggaagccagagccaaaggggagcaaggcccacggagaggaccccaccacctatcccgaccccttctccgcatagcacagtggggagccctgggcagggtggaggagcccagtacttggcgtgtcagcctttgggggcctgtcctgggataatggaggcaaggcctcccctagccacgtggacataagggtgatttttttccggttttccctgatgcaccctgtgcctccctgcagcccctgtgcccgtttcttcttcctcgtcctaacgtcccacctccctcagggtacctgtctcagctcctttggtcccacgcggactctcccggctccatccggctcccagggtccagcatctaagctcacgctgttcagcacataatccgcccccggcaaaacgcatctccagctagaaacccgcacctcccgctgtcagtttgggtttgatgactgtggcacgtgatggcagggtgggcatgggagcccaccactggctgacgcccccccccgcccttttgcagctgtgaggtggagcctcgttggtggacgcaggccgcgggtcgggagagccctgccctgggagccttgtagggcggctgctgctacttggtctcctgcttctccctggaacgcagggggtcgcggcgtgacttcagccttgcgctgtggtgtgcctgctgtcccgtgtaccagggctgcggtgactccagaaggtttcccagcctgttcttgtcacttgtgcgatggggacttcaccttccagacccgcaccattcccagtgggtggggggctgattggctctttcctctggggtctgctattcccgttccactgggcagatttcaaggaaagtggctggggtgactcagctcctgtcccacttccctactcactggctggcggcttcctgtggctcccgtgggcctcctgggccaaggggctggacctcctctggccgggctcctttccacatccatgtcgccacaagtccgcccagggctgggttcccaggttttgggtggaaacaggtcggtaggcgaaagtagaaagtggaggagcagccctggcagacacaggctctgtggacctgccccgccctccctccagctgttccagcctacaccggctgagggcccagctggcatcgccgttggtgggtctgctccagagtcatggcacgtggcacactgagtctcctgctgagtggactctgcccagagcttttcaaggttgagctgggagctgagcatgatgctgcatgcctatagtcccagctgctcggaggctgaggtgggaggatcacttgagccctggaggttgaggctgcagtgaggcatgatcacactgctgcactccagcctgggtgacagagagagaccctgtctctaaaaatattttgtaattaaaaagaaaattttaaacactaacttggggacagaactgatgacaggaagagcccccaggttagcagacacacagggtcccctgggttcccaccctggccggcacctgcccctgcatggttgaaagcagggggcaaagtgcacctggggaccctccttccaaggggctgagacaggggtctgtcgctcacccatctgttcaagctgcccctcacctgtgtctccatcggcagcatgggctaggcatgggctgtggacaccggagccgtcccctagggctctggccctgctaagctctgggcagcccccggccatggcatctcacaaagacgttccagggaccctctttagggaagcacgtccggtagttaccgttctgttctctccaccgttcccctgagcagttgcagcggggccgggccctggggtgggtcggggccgtgcagaacagcggctgggggaatgcctgagccgagctcggctggggagtctttacctctccgggtgccctgccctcccctttccttccatgctcgctgctggcctggtcagggcctgtggctttggggcctgaccacggtgaggccacgcccgcctcggtctacagtgcgctggagagtggtcctgtggcgtggcccccaagcgcctcttaaagaccgatgactcttcagggggtgccggtggtttttgcctggcggggtgggcctgagcctgggtggctgacaggtgctgctgtggcgctgcggtcctgtttttgccctcaatacactccctcgctgactttggggtgtcagctgttaattacatctgcccgtgggcctcagcgctaatcttcgaggtcagacagcagaggtgacgcggacacgggctgcctcttgtcatctccaatccagatccgtttcattgacttaactcctggctgaataccgccagttaattacagcaatcacagaccttcctgctccagccacgcggtgagaatgagggttcgagggccaggtgccagcctcgctaatgggcctggcgttgtgggggcatcgatcgaggctgagctggctggtctgatgagtagcacccgccagcggggattaggccgctgagtgtcaatggcctgccctgccccagagaagctccccacccttcacccacccctcttacttcctcacccgcgcctctttcttcctcacccactggtgcttagaaacgaggctcattcagagactctggagtggcagctgccttggtcatggcaaggggtctctctgggaggtggggttcagagggatggggcagcatggggtctggagccaggcagctccaggtctctgtgcatccccttatggcatgggctataaggttctccccatttgtagagttggggtacagagaagtctctgaggttcctggggcttggcacgtggtggggctcggaagctcctgctcccagctccccactgtccggtccccagggaggacccacagcccacctggccattggccccaacttttcccctgggcagcaggagcccggatcatgagctcttggcagcctctgcctgggtggggtggcggctctcggtgtgttggttttatttcctttttcggctccacagcacaaatgtccacatttcccctactcacagctactggaatctagatgggaacaccctgggtttgggccgggtgcacaggagggctttccatgaagtagggtggtggggcaggcaccgttactcatgcctgtaatcccagcactgtgggcaactgaggcgggaggatcgcttgagcccaggagtttgagaccatcctgggcaccacagcgagaccctgtctctaccaaaaacaaacaaacaaacaaaaaactagccgggcctggtggcacgtgcctttagtcccggctcctcaggaggctgaggtgggaggatcacttgaacccaggaggttgaggctgcagtgagctgtgattgcaccactgcactccagcccagcctgggcagcagagtgagatcctgtctcaaaaaaaaaaaaaaaaagagtgttgggcacagtactgttgacagcggccacaaggtgggcccagcctgtatgccaccagctgagggacggaccagtaaggagtgggtggacagaggcacacagtggactgtcacttagccgcgggaaggagagattctcttaggtgctgcaatgtggatgaaccgtgaagacacggctcccagtgagaggagccaggcgagaagggccacgcggtgggattcccttgatgtgaagtctccggaacaggcccttctttagagacggagagccaatgcgtgcggggcctggggagacgggagtggttgctcatgggtagggggttccttttggggtgacggaaatgctctgaaatggattgtggtgatggtcgcacaactctggacgtgctagaaccgtggggccgcgcgctgggtgggtgaattacgcgggatggaatcatagctcggtgaagctataacaactgaaacccaagagccatggaggttccatggaattttttttttaaacaacgatcctttccctagtttttattttttttccccaaaaacttaaagtgaactttttctcaaaatctaaatacatacagaaaagcgcctagactgccagtgtccagaacgaacccacagatcaggagggctgaggcctgttctcctgtccccaccctctgcccctgaggtgaggggcgtggtgccccgccctgcagccagcgtttcccctcctcaggtggatctagtagcccgccggcacagtgcccagtcccaggtgttggcccggtcgacttggggtggtggagttctcagggtgtgggcagtggttggctagtccatctgggggtctggggttgggtcacgcctcaggggcagcagccctcagcctcattccccacctgggccagatcctggtgggtgggagcgtgatgaggtgggggccttgccttgggcagttcgggggttgctggggagaatgtgaacgtgcctctgggccgctctggggcgtggccgatctggctagacggagtgtctgttgtggagctgccctatccagttgtgcaggttgcacacaagcccaggaaaccacattaaagaggcccagataccgttctgcaggaagcaacggacttgccctcgggacagggcagctgccccaccccaagggagcacctttgggagagcaaagttctgtttccacatcgggatgcctgtggggcctctgcctcctggtcacgccactaaggccactttggctgcctgaggcctctgggcaccccctgtgagcagcagttttctttggtgaatgtgcgcgtgcccactccggacacagtgaaggggagatgaggctgcttctgcccccggaaccaaggccaggtctgaacagaagtcgggcaggatgccgggagctgatgggctggggtcctccttctggaaagggcatctacctgcttctaccacgcattctacctgcttctaccacgcttcctatgcatgcattctacctgcttctaccatgcttcctatgcatgcattctaccatgcttctaccatgctttctatgcatgcattctgcctgcttctaccacgcattctacctgcttctaccacgcattctacctgcttctaccacgcttcctatgcatgcattctacctgcttctcccacgctttctatgcatgcattctacctgcttctaccacgcttcctatgcatgcattctacctgcttctaccacgcttcctatgcatgcattctacctgcttctaccacgcttcctatgcatgcattctacctgcttctaccacgcttcctatgcatgcattctacctgcttctaccacgcttcctatgcatgcattctacctgcttctaccacgcattctacctgcttctaccacgcattctacttgcttctaccatgccccgggctgtaggtgcctcccaagtggggcttttgcaaacagaaggtgcccaattgtaccacacctcctcagatggcagcatctgtccccgtgggcccaagtgcaagcttgcacagctgctgtgacacggggtctgggtgcctgaacgcacggtgctgctggtgggtggacatgtgcctgctcctgctggaacctgcccccagtggacactgctgtgataccatagaatccagggccacctctgcggcctgccttgttggggaccttggcctgtgctggacaccagttgggtgctgtgtgtgcctcttgggggcggagatctgccctgggcctgtgtcagggaagggggcttggggagggtgagccggacactgagctgtgtacaagtccacaaccgtgtgagcggcacgaggtctccccgctgcaggctgcaggccagccggagtcgggggtgtgagtgtgcagccgtgcaccccctgggcctcgtcaggctgggcagggctcttgacccccaggcagcagagcttctggagccccaggcccaggcctcactggcagccccagcctctggggagctgctctggtctcggtcacgggggcttgatccccacaacaagggggggggtgggggctccggaagcgaggctggtgcctggttggggacaggaggactcttgcagcaggtgcctttggacaccccctacccctgccaccacacacacttggtccccttctgacctgggcgggagggagacaacagaggggagccctggtctgagaaggcagttttgctccatgaaggaggaagccccttcccttagggcctgggaacactcctccccgtcctccccggtccaaacccctgccgcacctgcagatgggccggggcggccctgcccgtccatgccccctgtccttggggtatcctcttggctgtagccaccagtcacccaggcccaaagccctcctgcctgccctgcaccctccccctgctacccgcggggctgcagccacccattctcccatccctgctgcgttttgggggctgaggggttctttctgaggcgacgggcgagttccggggtaggtcgtggtggtggttgtaaacagcgaacctaggcaaacctcctgatgtgtacccttaaagatggtgaattatatctcattttctgaaatttaaaaataaatggatcttttaaagaaactcccccagggtcaccgtgggtcaccctgaatggctgccatttgggcttcctcagccaccaccgcactgcatccctgcttggctgggccccgtagaggggtgctgaccacttctttttttgttttgagacgaagtctcgctctgtcgccaggctggagtgcggcagcacgatctctgctcaccagaacctccgcctcccgggttcaagcgattctcctgcctccgcctcccgagtagctgggactacaggcgcgcgccatcacgcccggctaatatttgtatttttagtagagacagggtttcaccatgttggccaggatggtctctatctcctgacctcgtgatctgtctgcctcggcctcccaaagtgctgggattacaggcgggagccaccgcgcccggccagtgctgaccgcttcttgtgtttgttccctgctgcactgcagccccatgtctgccctgcttgatgggagcccccggagggggcgccttttcctgtgaccccccaagcacatgggggctccccgggaagactcagaggcttggggtctctgctgcttacacgtggagctgcctctcggtggggcagggtgtgtggcccagctggcctgtgtgtcctgggatgtccacaggcccttggttcatgacacctcctagaaacacgtgtgttctctaactctggggctccatgtctgtcccggaaggtgctaccttcgtctctcactcagggacgtcaggcactggtcctgcccgccctgcccaggctcctcctgtctggtggcggtgggcggccctgggcaccagagcatctgtgctttgtgccacgtgagcagggcccgtggggcaaagggatagggagtgcccggggtagactgagctgctgacccgatcgggcctcaggagaggtgtctcctgcctgcctgtcttgggtgggggcccatgaggctggtagacctggaggtctggggcctcacttggagcaggggggcagctggagcccaggtccccagctggcactgcacgtggctgtcactgcggctcccactcaggccaccgtcttctcctccacagggtcctcactgagcagcgagtcgtcccccgtgtcctctccggccaccaaccacagctcccccgccagcacacccaagcgcgtgcccatgggccctatcatcgtcccccctgggggccacagcgtgcccagcaccccccccgtggtgaccatcgctccaaccaaaaccgtgaatggtgtctggaggagtgagagccggcaggtgagtggggcggggcagggagcctagcgtcctctaagtggggaggctggattcaggcatccattgggggctctggagctttcgaggttgagtttacattccagacaccccctcccccaccctgagtttccgtctccttctctgcaacgtgagggtgacagcggcaccctcctggaggccctgtgcgggtgagtacatcggcccacgcatcagtctgtcagaagaaaccacccgctgggggtgtcccgttattttctcctgttctggaggccacaagttcacaatccgggggccggcagggctggtttccccagaggcctctcctgggttgccggtggctgccttctccctgggtcgtctgtggtgtctccatgtctgggtcctgatctcctcttctcataaggacaccagtcagctggtttagcgcccaccctaatgtccttattctcattcggtcacctctttaaagaccgtgtctccaaatgcagttccgttctgaggccctgggcatcagggctctaacacggatttgggcgggggtggcagtccagttcaagctgtgaaagtggtgtttgcacgctgagcacccggcacactagctgtgactgtcatagtctgtgaactgaacaaagaattgaggtaggaaagatcccagcccagacgctatcagaacaagacatctggtgggttttgtgtttctgtcttacttttggggctcccagcggaggcccctccccaagttttcggggctccttatgtctgtgggcccctcgctctgcactgactggggcctgcctgtgtggaaggagctggcactgggagctgctcttctgccgctgcctggggcctgtgtgccctcaggtgggtacctgcagctctcccggcccccccacccctggcgcgcagcctggagtgggcccttcctaattaagagcgattctcaggggctgctgtcacctggacttttctgctgagttcccagagggacagccccacttggaaatactaattaaaccacaaagaaggtggggaggaggggagagtcactcttgcctgaagctccctctcccccaggggaggacatgggtattggagccacctgctcatcatcagggcctgtctgccctctatccccagaggtgtgggaagggagccagcctcagtccacaggtgacagcccccgggcaggccctgatccagggtcccagtgggaatccctgggagctccggactgggacccccggggcctgacgttgcctctgcttcctttcacgccttccctggctgaggggacaaacctgcccagggtcctcaccttgctggacctcctctgcccctgaagcctctcgtagtttgactaatcctcatgtgaggtctggagaccgaggggcagggcgtggcctggagggtggaccctggccacaggggcctccacaccccacagggcttggagcagcccaaggcggccctcgtcctggtttgagggaggctgagggagttgttaccagctccgctgcctccagaggccgccccccagggccagccttgaccccatgggccctgaatcacccgactcaaacagctgaggctccttgcgccccactggtggggcctggctgctggtgccagcgcccgcagctcatgggaggccacttccctgccccagcctggaccaggagcttctaccagccaggaccctgcacccagccactgccttgaccccgaccagagctcctggcctagacccaggacgcctcgaggggattccagcgccttttccggcgactcctccgctctgagctggtccctcctcggagggtccttaccgcctcgggaacattgagctaccccagagcagagcaggggcgcgacaggcccgccccagcagtgtaccaccgcggcgcttaatggaacacggtgccgccagggaaggcgcggggccggcagctggattagcaggtgatgtacggctcctcgctcgggcacagaggctcagcggggcatttaatcctctcggagtggggaggcggagagaggattcccctcccacccggcccaaagctgtggccatgagtctccgaggctgcggacgtgggtggcagttgccgggccggaggcttctcggccccttctcggggtcacccctctctcccaggtgtagtgggagctgcgagaggagaaatgagatgaaaaagcctgttttaaagctaacagggcatgtcccgcctgtctgactatggaacccttgctctaatcaccggagaatgacggatttgctcctccccctccccctccgcccctcctccccctccccctccgcccctcctccccctccccctccgcccctcctccccctccccctccgccttctttctttcatcgttgcagctgcggctgcagccgctgctcagaaatgaaaagctgcccacagatgcgccctgatgcgtctgtctgtggagacggcagtgagaccccggctgccgctatcggggtgcctttggggtagctgccgagcctgccgggccttgcctggatggggggcagccctgtgcctcactccaggccccgctgacctagttcccaggtgtctgtgccagggttggccgggcgccagccagacggaagccacagacatgtgggtctggctcgccgggcccctgccccgcctgctggctgccccccagccccccggactccctgtttgtcctcagccaggccaggaaggtgccatctggcctgcgagcagggctttgtcctcggctgaggggagaaggggttcaagggccgtgtctgggctggggacaggcccctccttgtggcggggcggctggggccctgtgctttgccgtttgacccggcccacggcgcgggcagcatgcggagtagggcggcaggcctgggctgttggtagtttgaccctgggtgctgtcctcaggtcgaggtctgtcctccagccctcttctgactctggccacccaaggctgggtgatgattgaagcccctggctgtcgtctccctcctgccctggaggcctccccaccagcctgggagggggagtccaggtaccccgggtgcctgagcaggcgaggcccctgttctgggcatccagagacccactagctttaggcctggtgttcattggggtgctacttggatgctggggggccaggggccactccgtcttgttaagtccatcccagaccctaggaacagggtgtgtccttcctcgtgctccgttcctcagatgtttggccctatgccaggcagggtaggggcgtgaggcaggatctagaagcccagcctggaaatagcctcacggggctggggtaggcaggccagcctggcaacacacctgccatgtccgggcccccaccctgctggtgcgtcccccacatgcccgtgcacagctgtgccatcaactccgctgccctgtgagtcccccgcatgcccgttcatagccgtgccatcaactctgctgtcctctgagcaggtgccgtgacgggcacatgccattgatgtgtgcacgaggcacgacaggatggccaggtctcccaaggtcaggttggcccctcggccactcccccactaccccggttgctgacaccggctggagaccccaaggccaggcgctggctcctcaataggaagttcccggccccacgcagggcgtcagtgcccatgtgtacctcccaccctcgagaccagcaccctggagaggcaggtcagaagtcgtgaacccaggaggaccctacagagaaggggggccggggctcagcccgcgggaagggagcagatgctgcctctcattgaaaattccaggcggcggcggcggcggcggctcctccagttaatcctcgctgactgtctcctggagggtggagagaggggaggcgccggcccgggctgcctgcactgcctctgcgcgggtgccatgtgctgctgccgggtcaccgtctgccgctatgaagatggatgggcccaggaagaggggctggcgggtcagggacacaggcacggcccctgggagacagatgcttctccacggtggggcaggtctcagagcccctgggccatcattcctgctgatcttgtggggagacggccatggcctccttgttttttgggtgtttggcatttcgtggctcagggaggcagagcggggctggtgctcttcaggagcactgcccgctgatcagcagtcgttacctgacatggccagatggaacgtgaggaagggccgggttcccgtggctctgcatccctgggaagctcagaggggccagcgtggccatggctctcagacacccccaggtccgggtaggcctgggcagtgctgtccccacatggggaagatgctggggctgagaacggctgccccagtgacagagtgacgcctgggttggcagccatccagagtccagagcacagcccccatctgggccgccctgaggctccctccgcccccctccgcccccctcctcctcctcctcccacttagtcacacgaataacaggaacaagcaaggccttttcatgctctggtttctccgggctggaccctgcgtgtgtgcggggcagcctctgcgtggctaggggtggcacggcctatccttgaacttggcagggacctcagcccggaaggtgggctttgggccactgcctcctcctgctttgtgcctggagaagacccctcatctgagtcctctggaccaccttcccagctacacccaggtccactgtgtccaggagcctgggacaggcgagctgttgccttccctgccccaccgtgtgtgtgaaggccggtaccccagctggccagtcagggcccagctgctgcctgttctggtgggctccagggccagggccaccccaggaggtggttgggggcagaccagcaccttcggcccaggggcagtgccagcttcctttgcccctgccctccacgtgggcaccagggccaggacatctgcggccaggtgggcagctgtcggcgcagttgacgtcttggctacatcgtggcactcgcttcacggcgtgctgggtgccaacggtgtctgcttccccgggtgtgtgtctggtgtgaccttcggatgtccacaccaggaggggtggaggcaggagcccctgccaccctgcatccttcacctgcacacattgtgtttctggggggttctagttcttttgctggactgaggaggcccagggagggagacggatcccgagacgcacttcaccccagacctgtcgcagccacatcccctttcttacggttctgcttcccacaccacatgcaccatgttttgcgtagaaagccttagggaaaggatgtttctagaacatgaactaaatctagcgccttcccgtgagtcaggagacctggctgtgtcctgtggtcagtggcctataccaggctcctgccctgactggacgctctcctcccgcaggatgccggctccaggagcagcagtggaggtcgggaacgcctcattgtggagcccccgctccctcaggagaaggcagggggaccagccatcccctcgcacctgctcagcaccccctaccccttcggcctctcccccagctcagttgtgcaggattcccgcttcccgccactcaagtaagttggtcggcggggacttcggtgaggtggccaggtggggacacagtgctcagggtctgggtccccaggcagcctgcggtctgcacagatgaggctgtgcctgctagatggttgtcggccgctgagccctggggattgcagccctgtctgtgccccttcacactgaggtggcagtggcagctcgctccccccgctgcttaagccccgtcctcgttcggggtgccaggagtctgggtgccgactgagcgccaggggtgatgcagggagtttagccgtccccccatgcaggagcaggtgtgcactcacctgtccccaccttgcccactatccccgcctgcagcctccagcggcccgtgcaccacgtggtgccccccagtaccgtgaccgaggactacctgagaagcttccggccctaccacaccaccgacgacctccgcatgtcctcactgcctcccctcggcctggacccggccactgctgcagcctactaccaccccagctacctggccccacaccccttcccccacccggccttcaggtgaggcatcccccacgcgccctctcgtctaggtgctggcctgttcctggcaagatggaacctggcggggaaggtgtttcttatgacctgagagccaggctcctaggggagggtctagagtagcccctgaaatcgtccccagctttgagcctaaattcagccctgatggcccattaggggtcccctcctggtagacagtcccccttggtgactgtactgtcatccttggctcctccccttctcaccggggggtccattgacagcaagtcactgttaagagagcagggctttgcccgtgggagaggcgatgctttgctgtgtagcaggagacctcggtggcactgtggtctggcctgggtccgtggagaagctctgcccatccttgtcagaggtcagaggggcctgtagtcatgtcatggaccaccccacgtcagggcagcccagcctgctcgccagccttggaagggcctgggcgcttgaccactctgtgctggtctggctgagccgagggaggtggcaggcggcgccctggaaccccaagctgtcggcacctagcagcctccggcatcaaggggctttggggctagcagcaggcatggtcttcatccccagccattttgtcacgttccccacgctcaggcaggtgtgtgtacctggctgagacacacctgtcgacagggctgggtcttccccttggttcatttgctgctcacagccccgtcttctctgcacaggatggacgactcctactgcctgtctgccctgaggtccccgttctaccccatccccacccccggctccctgcccccactgcacccatcagcgatgcacctgcacctctctggggtccgctaccctcccgagctctcccactcatccctggcagcgctgcactcggagcgcatgtctggcctcagcgcggagaggtaagtgcgtctcgagccgaggagcccctctgccctccctgtcccttgatggcagctgggcagaaagcctgggctggaacctgactggactccttggccatgcctgtcctcacagtttgtccacctgccaaatgggacaatgatcgttcaggctctgctctgaaatagcgcctgtctcggtagccgtggtctcctgcagtaaacctgcaggccgaggagctctcgggcgtgcttgggcattttgtaagccgctttgattgtatggaccttaagttcttcctgcaccagtgaaacccggctcacctcccgtcactgttcagattagcgccctggctcgttcctggttatgctttttaagggcctgccccaggtccgtctcttgttcctggtgcagcagagcccccaactctttccatgtgctgcaggctgcagatggacgaggagctaaggcgggagagggagcgcgagcgcgagcgcgagcgtgagcgtgaggctgaccgcgagcgggagaaggaacgtgagcgcgaacgcgagaaggagcgcgagcaagagaaggagcgtgagcgtgagaaggagcgcgagcgcgagctggagcgccagcgggagcagcgggcccgggagaaggagctgctggccgccaaggccctggagcccagcttcctgcccgtggccgagctgcatgggctgcgtggccatgccactgaggagcggggcaagccctcggagcagctgaccccaacccgagcaggtacctgggcgtgggtgggctgtgctgggcaaggtctcagccacccgcggggaggagccctgaatcgcagcacctgccggttgccgtggtgtaaatgttccccagctgagttcgccctaaaagcgtggtgtggctgaacatggagtagggagcagaggcacgttggcacacgatgtagacacagtggatatagctgaccccaggaggacagttgtgaaatgtagccggggcattaggaagggatgttttgagtgcttcgttgattttatttctctgtaagtttacgaaacaattgtccagtaataacaaccagcttttgcatgtttcccggaaatttaatagtctgctctttgagccagcatgagctggctctggcaccgcactggctgggcaagagttttgccagccagccacggagcgtttccttccagggacaagacatgcttcttgaaagctcccgtagggccccttctgaatatcttggttctggctgcgggaagaaccctttggaagggctctggtttctctgggcagttgggtgagagaggacggggagggagcatgctggcccacgtggctgagatcctgcttgaccgtgtttccccccaacagagaagctgaaggatgccggcctgcaggcgcccaagcccgtccaacaccccttgcatccggtgcccaccccacaccacacggtgcccagcctcatctccaaccatggcatcttctctctgcctagcagcagtgctgccacagccctgctgatccagcgcaccaatgaggaggagaagtggctggcgcggcagcggcggctgcggcaggagaaggaggaccggcagtctcaggtgtccgagttccggcagcaggtgctggagcagcacctggatatgggccggcccccggtgccggcggaggcagagcacaggccggagagcaccaccaggtgagtgagccccaggaaggaaggagggatgagccttcacgttccgatttgttcagcgtgtattgagcacctcctgtttgcccgacatcctgccccagcgtttctgcctgcctctttcatttctgttctttcatcttcacgttataatgcctgtcttgcctatggggaagctgagactgaggaagaaaatggattgctcaaaggtatccccaccagtaagtaaagagaccaatcaagtccatgttgagagccagggcactgcacacgcagcctgacctagttcccaggaggccattcacagcagatgaagagtgcaaggtagaagctttaattactaataatacctgttctctccatcttcctctgcttttgagcctggacttctttttttaacaagaaggggacagcttttgattttaaggaaaaaaatgagttttattgcttttgtattaatagtaaaaacacatgcccgttttctagccctttatgaaagcatttcccaggaaactgtgtggtggtcccttggaccccggctgcagacacaggtcttatgagctgggccccagtgcccccagtcctccctgcccctgcctgccctgggattcctgccttggggctgtgctggtcccaggcccccacgtcatatacccccagggctcactctgaagggctgagctaagatcctcagccagagttggtgggaatgacctgccagccttccatagttctgctccaggcccagctcagggacctagggacactgattctgttccctgagcctcactttcctcaactgtccacaaaggagggtgggtaggatgatttctgagcatctttccagctctcaaggctgtgatgctgtcctgggataagaaacccttgggctctgggacggaagcgtgttggtggtttaaaatctgtcctcccttctgcctgcctccgttatccagtagggcagcgagggaatgcgcccccgctgatcagggatgactgggagtgactgtcaccaggccacagctaagtctccctgtggctcacactgcccggcacggccgaagtgagatcccttctgcctctcccagcccccgtccctgaggcctctcaggctcagccttgcctactacccagaggactgagggcagccagctcctacctggcatggcctgataacatcagggtgccctgactcctgtaggcatcttcttcctcagggctccccagggccccagcacaggtgttgtgactttgcccacccatggactgcttccagccagtgtagctgccccatccggacctggggcatgatgggaagcagggcctggcctcccctggctgcggtggttcccctgtggccggctgcacacgtggccttacagcattgtgaacttgggggcctgacagggccctcatgctccaagctagaaaactgttcagtgcttggtgtggcgcatgaaatatttattctcctgcaggtttcattcccttgctgtttacttaaggacacagcttcttcctgtggttccctgttgtattctgctaagagggacagcagcgtcggatttgtcccttggcctggagtctggaataactagggagagccttggtggctgtgtttaaacagggctcccggggcaggctagagatccctgagcccggccgtgtgcctgctgtggcctctgcctctttcttcccctcaagctttgcccagggtctctgcacagtattggtccagacatcctgtgagtatatctccctttaaaaaaaagaaagatagccaggcacagtgacacatgcctgtaggcccaactactctggaggctgagatgggatgatcgcttgagcccgggagttctcggctgtagtgtactatacccactaggtgtcccagctaagtccagcacaaatatggtgacctcctgggagcgggggaccaccaggttgcctaaggaggggtgaaccagggcaggtcggaaatggagcatgtcaaaactcccgcgctgatcagtagtgggattgctcctgtaaatagccactgcactccagcctgggtaacacagcgagacccatctcttaaaaataagctggaaaaacaatactaaaaatagccctgtgagtagattaaatcttgttttaattgcactgaggaaacaagccatttagtgtaactaaggggcagcttcttgtttaatggaagggttctgatgttagaaatcccttctttccctccctgcctcagcaggccttagcctgggtccttgaagacactttgaggcctctgccacaggccacttgggcagtggggtcgctgcagttgtgacaggggccactggggggcagtctcggcacaggccccatcctgactgggaggatcttcatttcacagtgggtttggctctggctgggcagacactggaaggttgtcttgtggctgcctgcggggacagtggggagggaggagtactgccctgtgaaggtggccagcctgccctgtgtcatgtgtccctacaaggcacagcaggaggagagggtgctggtggcagggccacagcccagtatatagagtgggtttccccatggaaagtgcggatgagcgcttgcccttaggggaattcacgcaagcaggtgggaaaatcgaccgaaactggatctgtcccaggcctgagagggtctctgccttccctagcagcttaggctgggagcctccctatcctcttggagcagcctgcacacacctgccgcaggtgttggagggccgggcacagtggctcactcctgtaatcccagcacttcgggaggccaaggcaggtggatcacttgaggtcaggaattcgagagcagtctggccaacttggtgaaaccctatctctactaaataggaaaaattagtagctgggcatggtggcacacgcctgtaatcccagctactcgggaggctgaagctggagaagcgcttgaacctggtaggcggaggttgcagtgagctgagcttgccccactgcactcctgcctgggtgacagagtgagtctttttttttgttttttttgagacggagtcttgctctgtcgcctaggctggagtgcaatggcacggtctcagctcactgcaacgtctgcctcctgggttcaagcagttctcctgcctcagcctctggagtagctgggattacaggcacccgccaccatgcctggctaatttttgtattttttagtagagatggggtttcaccatgttggccaggctggtctcaaactgctgacctcgtgatccaccctcctcggcctcccaaagtgctgggattacagggatgagccactgcgcccggccgagtctttaaagaaaagaaaggaaaagagaaaatgaaagacagaaacaatgatccttggggtggagtgtgtgtcccctccctgcagccctgttggcactggctctctaaggggctgcgccatctgtgtcatcttaggagcggcaggcagccagggaagcctgtggatgactgaagggtcttttctccctgactgaagggttggtttcactccctaggccaggaccaaaccgtcacgagccaggtggccgtgaccctccgcagcactttggggggccaccacctctgatttcgcccaagccccagctccatgctgcacccacggccctctggaaccccgtgtccctgatggacaacaccttggagacgcggcgggccgaaagccactctctgcacagccacccggctgcatttgagcccagccgccaggcagccgtgccgctggtgaaggtggagcgggtcttctgcccggagaaagcagaggaggggccacggaagcgtgagcctgcccctctggacaagtaccagccacctccgccgccaccacgagagggagggagcctggagcaccagcccttcctgcccgggcccgggcccttcctggctgagctcgagaagtccacccagaccatcctgggccagcagcgggcctccctcccacaggcggccaccttcggggagctcagcggacccctgaagcctggctcgccctaccggcccccagtgccacgggcccccgaccctgcctacatctatgatgagttcctgcagcagcgccggaggctggtcagcaagctggacctggaggagcgcaggcggcgggaggcccaggagaaaggtctgcctccccgcgggccccgagctgctcagggagagccgcacagtggggatggggagcctgcatgccagccacctgcccctctccgtccactcctgctttttgcctggggtagtcccaggccccaggtggcaagtgcactggcttctttgtagcagcatgacaccctcgtaggggaggcagaccctagtccccgtgcctgtcctgcctcgatgcaaattgtcccaaaaagccaaatcaaagcccgcctgtgaagatagttccgcagacaagcatgatgaataagtgatgagcggaggctaataagatagttttaaatattaatagtgcagcataacaggagagccggcctgggctcagcgggggctccacatacagggccgctgccacgagctgcagcaggtgggtcaggggttgaggacgcggcggctggcactgccccgggtcagggtaggaggtcaggcacttcattcttatttctgcttgggggtggggcgtcctcagccagcggctccctgagttctccagagagccaggaagagcaaccgagcaggcgagagtgtgcagaggggagcaggggctccagcccagttttcttcctgatgctgaacactcaggtcctgtccagtgctgagctcagcctcctcttcaatagaagctggggcacaggcggtcttcctggttgttggtctaggctggatggagggcccagccaaatttctctcccctactcactttgtaaaggaggagggagataccccagcgcccctgggcaggggctctgctattgttctctgtgtcttagagagctcaggcctgtgtgtgcctgtctcctcccaggagatggactcagatggccacagcatgggggagtgcatgtgcacaagcagccctgtgttgccgtggacacagccccaggcctgtgtgatgaatggttccctgccagggggaggagggaggtcttgtcagcccaggggaccacccagctactgggagccatggatcccagggaagcctggtgtctgcggtcctgcaaagccccaggactgggttaatgttggtttccacctcggttgaaaggaactggccttcagggtgttcaggtgccagcaggcctggcctgataggtgctctgcacacatgaggccctgcgggcatgtccactggacagatgaaggctctttgtctggctgaatacaaccatttctccatcagggtactactacgacctcgatgactcttacgacgagagcgatgaggaggaggtcagggcccacctccgttgcgtggccgagcagccgcccctcaaactggacacgtcctctgaggtactgggctctcctccccacggacatgctctgggctgggctctcgttcctagcgtccacaccctgcagtccaccccactgttgctaggttcctccgaagtcctggcgggttcgccccatgaagctcttctcccaccaggcgcagccagctacggcccacacttcgaggaccccaggaggggaccccgggacagtgcaagcataccactgccagtggcttcaaactcatttgttttctttcccaatctagaagctagagtttttgcaactttttggcttgaccacccaacagcagaaggaggaattggtggcccagaagcggaggaagcggcggaggatgctgcgagagagaagcccgtcgcccccaacaattcagagcaagcggcagacgccttcaccgagactggcgctgtctacccgctacagccctgatgagatgaacaacagtcccaacttcgaagaaaagaagaagttcctgaccatcttcaacctgacccacatcagcgctgagaagaggaaaggtagggcctcgcctgggtaggaaggtgggggctcactggggtggaagtgggtttctgaagcagcaggtggggccggtggactccaggcaggatctgcgatcactgagcctgaggctgcccctttactcctcccggctcccgggaacagcctctctgttcttacaagccctccatagcagccttacctgacaggctttgctctgagagccccaccatcttgacctgaggactacccatgtcactcatccatctcccagcgcccgagaaggcgctctttgagccgagtgctccagtgaccaccaggcgtgaggggaggtgccaggtgttccaggtttgtctgctgcaggcttttcctcttgctggaccgcttaggtggtctgctgggtgttgtgtcctggtggccggaggcctggggaagggctgccaagcagggcagcacacactgagcagatggcttgccttgaaagatgcttccagttcagtctggccacacagggccacattgggacagaccctctgggctcgaatccatatagcagaagaaacaacgcagccacaacacctgctcagggttttggcttccttggcctgcagcgcaggctggcttggtgcccagatgttgacgttcctggccctgccccttacgcacgctttcaagtcctcgtgggcccctggcctcctctctgggagaaagtcgaaggaaagcagagttacttcttggaccttgagcagcttcaaggtgttgatcagggtgtagccgtttactttctccttttaaccagtcagtagttttccctttctcttagcgggctagtgacgtgttgattgccagcccagttccctagatacaaagcatctttttccctgaatttttggaggaaaaaaaattaagggcgatgcagcccttgagtttcacagtcaagaagggccgggtgacatcagggatctgctgcgtggaacatcgtggggtcatctttccccttcaggaagtggcagtaatggtaggagtgggggagaaggcaccctgcctcagaggccaggcctgggtctttggggtgtttctttgtgttggggccaccttgtctgacttgaaataagaatacatcctcgcacgtcaccaccgaggtccgtgggcacagtgattcacagaggcgtcgtcaccgcacggacagctgtctttggagcacgtctaggacattgtgtagtggatgccgagagcaatctgggctcgctttgagatggttgcttcctttcaactgggcctgccccatcacacctgcttttggtttttcgggctttagtgctttgcctgcccctcaaggctcggctagaatcccgctgtccttctctccaaaaaatgatgcaactggctcgttaatctcaggctgcttttctcatagacaaagagagacttgttgaaatgctccgtgccatgaagcagaaggcactgtcagcagcagtggccgactccttgacaaactctccgagggacagtcctgccgtctccctgagtggtaagggaaggatagccccacctgccaccacccaggaccatcccatgggctgcccaggctcagaggcgaccactcgaggtcttcatcattgtgaatgtggcctcctgcaggctgtcttcttccattcttgtaccagcgtacgattcttgcacagttgtgacagtcattgggacggaacgtcagtttgaaggcgggctcagagttgaggggagggtctggcttctgtggagctctacgtgctggtcactatggtcgtagtaaccgttgtccttcagttacggcacagaggctcacatggaggccaatccaatggtaccatcccaggagggagggcgtgctccagccttagtgcccgcagcctggtcctgccactagcctagccgccctggctctcttcctgctctttgtcttcctcactctgccctctgggccctgccggcacctgccgccacacctttcctcctcttacagttctggctggcctctgccctgtcagatgtcagagggaatctttacagtgcgtcccagtcctcggcccctcacacactctcttgtccggttggactgaatacctccatgctgcctccgtggctgggggacttccttcttcctgtggatctgcttcttccttcttgggacatctttcaaggatggacttgccactaaacaccccactgtcttcagagaatagccatgtgcgcggcggttacttaaatgttccccgggtcttggttctttgcgctaggtctttgttaagtgtaagctctagagaccaggatctgcgtgctggacactcagcctgttaacttgcatttcttaatattttccttcactttgtctctaaaagaaccagccacgcagcaagcctctctggatgtggagaagccggttggtgttgctgcttccttgtctgacatcccaaaggccgcggagcctgggaagctggaacaggtccggccccaggagctgtcgagagtccaggagctagctcctgccagcggggagaaggccaggctgagcgaggcccctggaggcaaaaagagtctgagcatgcttcactatatccggggcgctgcacccaaggacattcctgtgccgctgtcccacagcaccaatgggaagagcaagccgtgggagccctttgtggcagaagagtttgcacatcagttccacgagtcagtgctgcagtccacccagaaggccctgcagaagcataaaggtaatgaggctgccagtccctgctcagctctcggctgtggttgaggctgaccaaagttgctgagcgccacagctgctcagccgttcagccgtgggcacaagtttttataaactccaatcaccagaagaaaataatttcgttattatgccaaaaccatgtttgtttgtttatctccaagctctaaaacctgaactcgtaggtgagaaacgtttgtaggcaccagcgctgacgctgtgctgtgagcagggacgcatcgatcggtaagaggtaaaggagtgaacgccgacaggcattggtttttgcagagattaaaagattccccaaaggcaggaagagcacttgagtggatttttacccgcattcatttgaaagaatcatgtttttcaagacagagatgcagatggccgccagtcctcagggtagagcttcccttccttcatggtggtatctaaagatgtcaccaccagccctctggatccgtgggttccgcgtctttggattcaaccagcttcagattagaaatatttgtgggtggggtggaattccaccaagttccaaaaacaaaacttgaatttgccaagcaccaggtactacattgaatccatgcaaatcaagtcaagtgtaggcattgtgttaggtattacaagtactctagaggtgtgcataggtgatacgcagatactatgccactttatatcagggacttgaacatccctggcttttggtattcacaggaggttctggagccagttctccatgacagataccaagggagactatacagtgctactgagatgcctttcgaaacttcagaataccctccctccctgccctttggcagtgcaccttgtagaggcttttctgtggccctaggacactttctgccttattctgaccttgtcctggccttacactaaactgtttcctctagattttagtcactctgccataccagtttgagccaagtcactccattgactgggctggtctcaggccccaccaggggctgccatccccacgggaggccaggtgtgctcctgaggatgtcacccaccaggccacgccatgagacagggcatgccctcttgaaacggggcacaatgaggctgattcctgggggagggcagagccccattatgcctagggatcaaaacagccacgccttgtgagaggatgggctggtgtctgctgagggctgactatagaccaagctcaaagagatggaggcagccgggcgcagtggctcacgcttgtaattccagcactttaggaggccaaggcgggcagatcacctgaggtccggagtttgaaaccagcctgggccaacatggcgaaaccctgtttctactaaaaatgcaaaaattagctgggcatggtggcacatgcgtgtaattccagccactccggaggctgaggcaggagaattgcttgaacctgggaggggaagttgcagtgagccgagatcacgccatttctctccagcctgctacccagaggactgagggcagccaaaacaaaaaatggagtctcagagatgaattccaacaaaaatggtccacgtaccagaatcaactagcactcagggctgcgttgtctcctggctgtctcggactttctcacgctgggtctgtggcccagaggtcttgggctaggtccctcctctctacgcgatgtcatcttggtccccggagccctgcagtcatgttgactctgcaccaagggcagagcagagctcccttctgagacagcaccctgtgtcccttcccccaacacactgatgcaagccctgtcccctccacagggagcgtggctgtgctgtctgcagagcagaaccacaaggttgacacgtccgtccactacaacattcctgagctgcagtcctccagccgcgcccctccaccccagcacaatgggcagcaggagccccccactgcaaggaagggccccccaacccaggagttggaccgggactcggaggaggaggaagaggaggatgatgaagatggagaagatgaggaggaagtccccaagcgcaagtggcaagggatcgaggccgtttttgaagcttaccaggaacacatagaaggtaagggggtgctggggaagaggggggagggggtcaggaaagtacctttggaaaggaagctgagtgatgagttcatgcagacctctgccagcctggggactgtttctccgtcctggggcacagtagatatgaatactggaagtttcttccggcttctggtagcggtgatgtcccatgctggaacctgaggccagtcttgctagggcatccaagtaccatgatgccagctctggtggcacctgtcattctttatgtgggccctgctctgtgggctgcatcagtgctgatgtcggcctcagcttcgtgtaagggtcctgggagacaacctagttggttgatttgctgagccctggcagctaggcctggtcactgctccagcatgcctcttgcctagtgacagactccccacactgcaaggattgctctgtggccggtgggtgccagtcatgttttcagctgcctttactttagccaagcactttgcctaaaaagacaggctcctggtaaaggcttagtcgaaggcttgccgcctctcagaatacccaggatgttttgatcccacctgggaatgcacacaccaaccctcctgggaagccacagcaccaggcggactcaggccacatctcccctgccagggagtggggccacgaagttgggcgctgcagcatttgatgctcctgtatactgcacaccaccttctgcctctgtgcctcagtttccctaggatattgcacaggcccctttggggaacagcagaggtacccagccttcattttgcactcaccatccttactgcgtgggcactgctgggtatgcgctttgacaaaagctgggctgggccacagccacctgtaattgatttaacatgtcctagaggactctttatcatcacatatgacagtgttgtaaatatcatcaaacacaaagacttgattatgaatgtcagccacttcaaatacttagaaaagtagtttttttcttttttctcctggtagaactcagtcaggaaaagtattctccaaactaaaaacaaacgcccatgtagccacaaccaggacatcaaatcccgtattttgtttcctttcctcctcccgtggaatctttgagtttattgcgcaccaccccctacatgttgccattcttttagtgcactcgtatatatccagaagcaatacacagtgatttttaactctcctagatgaaatatttccatctttgctggttttgtaggttttttggtgtggtgttgggaattatttccataccccatggctgtcaggctattcttctgtattttcttctgtgagtttggctttttcctgttctgcgtaggattcatgtgtgtgtacagagtaaggcagaaatcttaactgtacctttcccacccaaccagttgtcctggcaatgtgtggggtgccctcttccctgcctcactcccacacctgctgggcctggcttcgcccctgtcaggcatgacctgcgctgaccccctcttctctcagctaccgctcagctgtttttagcccatggctttcccccaaggacttttcccctaaggattttaggatcgccttatattcaccccaaagagtcctggtagattttcagttgcattgaatttacaggcgtggttggcatccttttccatgaatatggtacaaaactattacatcatttttggacgtgaagttttgactagatttagtttcaggtatcacatagattttgggggtctttggatttttgtgttgcctgtgattattccttagatcagaggaatcacagatgatcaaacctgcaaatacaaggtttggttctttccttttgaatttgtctgattgtcttgtcactccagtgctgccaaagagaggcactggtggggcccttgtctgtgaaactttaaagcatcccattaaagagtgaaggttcccatttccggagtttttcatcctttgattttttttttcttgatgttgctccatccttgttgaatttgttagtacttttaggatttttaatgtatgttcgttagtattagactctagttttattgtactttggtatccagattgtgagcactttccctgtttttcatttgctgaaacactgtgtataaggtagggatttgtcctgaaagatgtgaagtcactctcctgttcaaactaggcctggtatcttttggtagagcagaggctttattttattaattaaatctgtgctttaggtgtactctggcctttttccagcagcctaaactgaaagcctatttttttttttttgaaagctgcattttaaggccatcaaatttcttcctaatctgtatcaaattgcctttaggtcctggatcctttgtctttattcctgtgtattgggcttaatttagtgacgtttatgtatttatcggtacaattcaaagggctgggagcattgtggtccacaggagaggccttcgctggctgcactggagagaggttttgggctctgctgggcagggtgtgaagaggagagcacaaagcgggccttcgggctcctgcatacggaaaatacatcaccatctcctgtcttttcagagcaaaatctggagcggcaggtgttacagacacaatgtagacgactggaggcccggcactacagcctcagcctgacggcagagcagctctcccacagcgtggcggtgagttgggaagggatggaaaccttcaaacacgcaaccttttgagtttgggttcagaaacacccatgcagataagtttcagagaggaaatgtgctcttaagagatcaaaatttggcggatcacgaggtcaggagatcgagaccatcccggctaaaacggtgaaaccctgtctctactaaaaatacaaaaaattagccgggcgtagtggcgggcgcctgtagtcccagctacttgggaggctgaggcaggagaatggcgtgaacccgggaggcggagcttgcagtgagccgagattgcgccactgcactccagcctgggcgacagagcgagactccgtctcaaaaaaaaaaaaaaaaaaaaaaaaaagatcaaaatttggactgcatgcaatggcttacacctgtaatcccagcactttgggaggctgaggcaggatcacatgagcccaggagttcaaggctgcagtgagctctgaccacaccagtgcactccagcctggttgacagagcaagaccactgtctcctgaaggggtaaattcagacaccagttgattatctaggatttacttatagaatatcgatcctggaagggtagggatgctgtttgtagaatgaattattgcctgtatcagtctcctctaccgtgatttgctgaggagagcagcagggttttattagagaagggaagctgaagcaactgaaaccatctcacgtggctcacagccacactagcaggattggttcagcagatgtccttggggggcagggatgggaagcaggtctcagatcactcccaaagtttttacatctgggggttccaagaactccgagtttgagccaagacagcagcagatgccgattcttaagactctggaagagccagggacagaacacaggctgagaagtggactttttttctctttttgaggcgaagtctcactctgtcacccaagctggaatgcagtggcgcagtctcggctcactgcaacctccgcctcctgggttcaagcgattctcctgcctcagcctcccgagtagctaggattacaggtatacgacaccatgcctggctaatttttttgtttagtagatggggtttccccatgttggccaggctggtctcgaactcctgacgacaggtgatctgcccgcctcgacctccaaaagtgctgggattacaggcgtgagccaccacgcccggccgggacattttcaaatgtaggtttacccttccatccagcatgtttgtactctacatgcttgtccttacagaggaaacgggttggttttgacacaaatttccctctctccaggagttgaggagccagaaacagaagatggtctcagaacgggagcggctccaggcagaactggaccacttacgaaagtgccttgccttgcctgcaatgcactggcctaggggctacctgaagggatatcccaggtgacggtttcccttgcactaggccgaacctatagtatagaaatattatctattttattaccttgaatatttaatatttttcactgggaggtttgaagcttacaaaatgagaatgtgccatgcatgaagcaaaggattccaggctccagaaaaaatgaatgaactcaccttgacgtcaatgcaattgaatcaccgttgtcattcagcgagcaaccaatgtaggattgcccacagtttttctttttaaaggtggttttcgcccttcctctcccacattatttcttaatctgaacatgaaggctccattagcaacactaaaacttgatcattaacagccccctgtgcatatgagtggatcaaaccggttctgttctttcttgtgttgccatgttactatgcctcaagcccagtttgcttttgccgcagcgatggggccagtctcattcctccccaggagtgaaacttgcttcagctgaaaaggttgggtgcattgtcagtaaaaagggcttatttgtttcattttactttcctgcaaaattttcttcaaagcaacaagtcctaggagcacacaaagcaacccaaaggcttttccctggaaaagctctttcttacctaaagataaaaccaattcacaaactgaaggtagctttttattactccgtggggagcatgtacagagctctgtgtatacacagcttcacacccaccagattgttactacagtgggttgggttttcatacagacgtaaattttgagagaaaagtcaaaggtgcttcagccttgtactgtgtatatatattaaaaaaaaaacaaagttttgtatgtttttattactttaactattgttataaaaagcctgccatttttaatatgtggtttgggggatttttgtttgtttttcctgtttgggggttttgtttgttgttttggttttttttgggcaaaaaaaaaaaaaaaaccttgcttttagtgtttgtactgctgctggtcaggacattaaaatattgaagtgtttttaaaaattaaagaagaagaaaagtaaaagagcttaccactggcgcctatgcgatcacttcatttttagtttgagttgcaccagaagctgccgtagaaagccatgcgctactgcttacctcctccactccccctgcctgcccccagcatctggacaagctaatagcaaatattacccattgctatcaagggaggagggggtagtctgtagaacccatgtgtgacagtcatgtgcacacatgggcgggggcttttaaaaacctttcaggaagtcaatgatttctgtgattgatataattctaaggtgtctgagagcaggtacagaataggaacttcagaggctttgtttaaacgcaaagctttgtaaaagccacaaggtctgagctgaacccctcctttttgaacttactgtgacaagcacaggaacggtcagaaactgggctcatcacaccaaggcaaagcaacgggcgagtcttcctccttgtcctagttactgcctatggaggcagtgtttagatcaagaaggcctctcttgctcccaagggccctcaccagaggccagggctgccagtcactggtctggggggtggaggcctgagctgagggcagggtgcctgacctgtgtgccggctgctcactgctgtgaccagcagccgagcccttggccctagcccttgctgcgcagaacagcttgctggcagctggcatcgtgtcgctttatctgcccccgcacagtttgctttgtacgtctgccaagaatcttccagttattagcaaactcagacgaatgtaccgccagtattatcagcagtcaacaagcaccttcctctccacagaagcagctggaagagaactcgaggggctgtgctgcaggcctcccctcgaaagacactgggaggtcagcatgttccacaggtgttcagagggagtctgctacaaactatcagggcaaaatctcactggatttctccactgaaaacctacttgaggtttctggtctgaaggcttaagagtcacatcttagcacttccgctctcaggcctcctcctccatcacagatgtctggatgcttttggaaatggccttggctaaagtaaaagggaaaagtagatccgataacttaaaaacgtagctcatcccttaccatccaaggggcactcccttggttggattttctatgacagcacaggggacaggtggcacaccatgagaggtctgcccagggtgggagcagtgtcactgtgctagcaatagttggcttctcccctgtcagtggaaaccccacttctgcccggcccttgagcttcttgcccactgtctccccatccttccacctacttgtggcgatctgagtactctactcttgctcaagaagtaatacgacaatcagaatacaaaccagtaaggcaacacgaataaactaagaaaaaggtaagaactgtctcaaaaacgaaagcacaccacccaagacacagtacccagtcatggtttccccatccaactattagtttcatactttgaaaacttactttcagattattctcaaagaacacagtagcacctaaatctgttttcaattgggcttaaaaattgacatgcaatctcttaagttttttgttcagctacttcacactgagtacctcaaatctgctctggagtcgattatgccacctgtgtgtcaggatgcacatgaaagccctcggctcggtccttagaccatcttcctacattacctggaagggagctgccatctgtccctctgcagagggataccttccaatagtaaattatctggttcctcactgaaacaagttatttttgcttcatatagtcagagtcagactgacatgataaaatatcatgttcctaatctgttgtctcagataagtgaccaagacgggactttccacattttagtctacattctaatcttaaaggaataaagcactgaattgggactaacattctgataggttgcacccttaagagtattcagagagcatcaaaaggagcccacaccttcagcagtgaaggattctaacacagggaatctgcagtttgtagcagaatggtattttcctcaagtagctcataatactgccaaatctcaaaagttaagctgaatttcacaccagatcctacccctttccctgagccacgtgtttcacacaagtgtagaaaatgccagggatccaccacaagatggagatggtcagcacaaaccgattctgttcctctttaaagtgtatattagccacttagcaatctctatattctttcaagtaaccaagctgttgactttcttactacttgcagtagcctgtccccaacttttccatccagtgcttaacctaaaaaactccttaactctgccttgacctgaggaagaccatgctaactggtgttattttgtatgtaccctgtgcttaattctataacagtaaaccccatacgcaggtgggagggaggaacaccggtgcctcggtcactctgggggcagtttagatgctgtgaaattaaacctgttctaagtgtacttgtttgaattaattgtattgtaatattatttgttgaatgtagtaattaggtatttatgaatatattgctgtaatttctgacaacatccaaaaaataaaatcttcctaaattatgttaagaggaaaatcttttttatgatataaaacaaagccaaacaaagaaaagctcaataactatacatctccgcagacggagctgcctccactggctcaggctctaagaggagggcattaggaccccttgccctccacaataacaagtggtttcattctaaaagatccccagatgaaagcaggaggattccaaggaaggctgagatgaaagaacaagtcctatgagctgaaccaagtctgaacagcaccttaaattatggagacctcatcttttggtcccagtcttccaggtctgacccttcagtgtccaaataaccaccaaaacctgcctggcggggacacgtgggcagcaacatggagtgatagtgtgcagcatgctagacactggagggcagatgctgggtgataagtctttaggctcagcctgtcacacatgcgcattctcagagctccccagacagcaccccactgcttttggcccactggtgtccagccaaaaataggctggccaggcatggcggctcatgcttgcaatcccagtgctttgggaggctgtggtgggagaactgtgtgaacccaggagttcgaggctgcagtgagctataatcacgccactctactgcagcctggatgacagaacgagaccctgtctaaaaaaaaagttaaaattttttttgtttgagacagagtcttgctctcgttgcccaggcaggagtacagtggtgcaatcttggctcactacaacctccgcctctcgggttcaagcgattctcctgcctcagcctcccgagtagctgcgactataggcgtgtgccaccacacctggcaaattttttttttttttgtatttttaatagagacggggtttcaccatgttagccaggatagtctcaatctcctggccttgtgatccacctgccttggcctcccaaagtgctgggattacatgcatgagccaagccaatgtgcccggccaaaaattaaagttttttttaaagctgattacagaaccttctatccattgcatgatgctggacgatcatttcacctctcaaggtaatgtaatttctgtaaaggtcctaacatttccaaaatgctacgaataaagtaattttctcttaggaaaaaaataatttcccctgagcccactgttacctacaacaaagaatccttccccaaatccatcaagagcagcactgaaagtgacttttcttctagcattgtcactcatgctcaatacattgtcactcatgctcaatacattggattcgtttttttcctgactctcctcttgataagcaacccattaaacctgagctagaagtagccaagagaaggagacaccccaggtgttggtctgcagtttccacttaactgccgtgtgcctcagtttcgttgactgagtcatctcagccacaggctcagtccttttacttggtagttacgcagcacaaaaacctagagagtcagagctgagttgggtccatttttattgtggatcagggcttagaggataagcaccggtcagcattgttggctgcaccatctgccatccttctctgtgagccacctctgtgagagagtctaaattcagcccaagaaatcaggatcaagaaggggtaaaaagccgtggaccacatggccactcctgctgtatctacacctaccagtcactgaacacctgcccaagtgtgatggcttccatgcaggagacccaagtggctctgctagggagaatgacttatttacctaaggcttttttatttctcaaaagtggggggaaaaagggctggtttctagaaacagatgtggaattgaagaatgtcccagggagctaagttttaaggactaatcacaaacttgtttctccaacaacatcctgaatccattccttgcaccatcacacatttttcatgcatcagaagtgtttctagagctccagaaccacgagtacctcatcacgtcctgagcgctcacatcccccagcaagccgcctgcaccaggcctttctctagaagtcctgagactgagtactctccagaggctggaggttcgtgcggagtttgtacatgtggttgagcgcttgtgtgaggaaagtcccgctggtgttgatctccatcaaggtcaagttatccagctaaagcaagaaaacagaccaagttggccaaggagtttttgattttgagaaaaaggtaaactctactgaataaaaataagaaaccaatgaactgttgaaaagcacagctagtaatgcctgcctgtaatagcctcagcagacgggagccatgtgaaattatgcggcatcaaggccaccagcacccaggcaaggcggcacctaccttggcatgtgcctcctgctgtctcacaaagctgtcagcagacactcggagtttggctatacgagtgtcccacatatccttgaccagggtccggatttcgtctgccttcgggatgttgtctgaagcactaaaggagcaagggctaaagtcagtcggggaacacttgataacctgaggcaatgctggatagagtggctcttttcaggcaaaataccgtggctattccagactcagaaagtctgttttgctttattttcaactttagggtgtaaagatttgtagcagttaagcttggtgcggcagtgatccacatggagtttcttttgctcacattaactatcccatggcaggctgctgaacaggactgctgtttacctaagaaaattagtagagaatcagctctaagtcagaagcctctgtctcaggataacagcattccgtgctgcctaacctccatctacaaggaatcagtttcgagggctggctcaaaggtcgagttctattgctcctcatttacagagtgttgagcagatctccctattccccaccaggaatccagggctcacagcctagagaaggaaaacgccaactccatgccaggtactgggctcagcactttacctggcatttctatcctcacaaaagccctgaagggaagggactctcctgctcttcagagaagacaaaaacaagtttcaaaaatcacagaagaaactgcaaattagtatacagtgagcacacctacacatagcaaaattctggctagaagctcaaagccagcaagggatgaaggaaggctttcacaaagtcgaggctcccgttgtgaagtattttaaactaacctttgaagaaaaactacacgataaaagcagaagcaaatattgttcgtcactaggcattacaggttacgctagacattctctccatatgctacaattaattcctgatgagtaagtggcaaaccactggtacaaaatttatgtagtgagttttatttataaacccaaacatttagatcttgtgctctcaacagcaggttaaaggacaaaggaccccaactcctcgtcagctgaactatagaacaaacgtaaaattaagtcccttaaccgaatgaattataaaacaaggtttttgataaaaactacatccataatatattgaacttcaaaaacaaaaaatggataggccccctcacctagctaatgccaaattcttacctagcctgtttatagatcctctcccttccagctaccatccccaccaccactacagtctctctcaggtccctctgaggccacatgcccctcccaggggctggccactgcagcagaacctatgcctccattcctctgctcccatgaatgtactacacatcctcaaatatctctgcttgcccggctacaccaggtccttcacactctgcctgagcatatcagttcctgcctcactgccctctcccctaccgtccacctcctacaagtctgcactcccagcaaacctctgtgagccctctctggcaccacctggccttactgcgctctgatggactgtcaagagcattggtcacactgaagattcactataggctcccaggcccacacctctcccgcaccacaccaggaagcaggcctatgggacaaacgccactgccgagtggaatgcttggtgcattgctgcttctcagctttttatgaaattcatgggctgactgcagcctcatctcagcctaagcacaagcccatgttgtgtccccaacttttcctttaaattcagcagcgccattcagtgggctcccagcccttcctgctgctctgcagcatgcagtagtactagtgtcacaattttttattctagttctgctcttgaacccagttaaaggatacccggggagcttcagaagcttgaaattgtacaaatgacattctaagtatctcccaagcaaaattatccacccttgtctgccttcttcactagtttcactttcactcaacaaacatgagccgcaggcatctcactggggacatatgcatacgagacccagcccctgcccatttagaatgggtacatgtgatggcacagccaggcaaacaagaaaattaccactggcaaatgccatagcaatgtgtagagctgccaagagtacatgtgtgctgaacccagaagagacatgttatgctaaccagcagaggtgagcaggggcagggaaaggacagacttacagggcagagaacagtatatgcaaagtcagaatgcttgaagaagtgacaggggccagtgtgagcctgagccctccagaagcagagaaaagagctgtagagagggtgaaagagggaggaggagcacgcactaggctgtacactgcttgaacaccacgctcaggtagacgagagggaagacaggattttaagcagggagtcacatggcagttctgcctttcaaaggcccctctggctgagatgtgaagaatgaatggaaagctgagcggagccagtatggatgaaggcaaacaagctacggagttactacagcatgattttgccaggaagtgggctttcctgtaacccaaggacagaggcaaatgtaagccctctggcctttcctgcgaaagacacaaaaaaactcaaatccacctactccaaggagaaacaggagtaaagctgtgctaaataaaacacatacatggcaaagaatggctactgccgattctgtgagatgctggtggctcacactggggtccaatgtcgagtgatgtgaggcagaacaaaaagagccaagggcttcaccgggaagtggagaaaaggaaaaatgagagacagagaaaggcaaagaacagacagaaagacacacagagacagacagagtgcacctggcaggtgtgtgtacacagatgacctcatggtcactgacctgagaaacagggcggccagtgttgccacttactgaggcaataagcagggaagcggagaggaaggacgagggttaggggaagggcatggcgagtccagtcttgggtgtggcctctaagaggtgagatctacttactgatttaacaggagcttcgtaagttccatgtagtaagggctgggcattggggtaaaagtttcttcctttcgttcatgatccctcatcttctccaacttttctgaaatttagaagttaatacattttaccatcattataaccaagatatttattaaaccttccaaatttaccaagtgcctatattatctggcaaatacattatcaactagcaaatacatgaaaaaacattttgggatgacatttgtatcattaactagatgatttgaggcctcctccttgaaactttctctccaaaagaaaggtaaatttttgtcgctgctttagcctgcagaagatattcctaaaaacaatgttagagtcaaaagtttgatgtttgttgtgttttgcttttgttttttttcttttttagggaaacagcaaagtgatttacctttaccgccttttttttttttttttttttttttttgagagggtctctctcatgcccagactggagtgcagtggcaccatcacagctcactgcagcttcaacctcctgggctcaagcaatcctcccgcctcagcctcccaaggagtagctgagatcacaggcacatgccaccatttattttttgtagagacaaggtctcactatgttgcccaggctggtctcaaactcctgtgctcaagtgatcgccctgcctcagcttctcgaagtgctgggattataggagtgagtcacctggtcagtattagacctttgatgcaataagtgatcaaactagtcagtgacttaaatttatttatactaagccttgttcagaagggagcaagacaacttacaaaactagagccaccccagcctgggcgcgatacaatatcctaggggggttaagccaccccagcctgggcgtgatacaatatcctaggggctaagccaccccagcctgggcgtgatacaatatcctaggggggttaagccaccctggcctgggcgcgatacaatatcctaggggttaagccaccccagcctgggcacgatacaatatcctagagggctaagccaccccagccgggaggaggcatgacatcctagaggggtgaaagcccagcgtctagaatcaaacagctgtatccaattccaccagcatcagcactgttctcacacatgctccagctccctcagccctccccctctacagagaaacctgtcctgggagcagactgtgtactatagctaagggacaagcacggagcacagctacgctgcagggtcccattgtaaacggccaactacccatccccagggcccttggtgccgtcctgcaatcctggcccaattccttggtctactcaccctctcttcactgccgccagcaccgcctcaacccaccacccacctctcacctgacacccagctgagtgtgacccacacaccaccccaacccccaaactccctgtgtagctcctacccactcgaggaccagccttccaggtgtcctggaccctcctctcacctgcacagtaaggcactccagcagctctcatgctcttaaatgatcactgtcccctccttgcttgatcctcccaaacacactaatagatatagccttaaaaagaaggccctccgtgaacacccctctgagcttgcttatgaactcactaggctcccctttttgtctcctggcaattcctcctgacctctcgacactgggacaaagagctcagctcccaacccctttcttcactacctaaactcatatccacaccacctcgtccaaatgctacccacatgctcagaaagacctccaaatttatacccccatcagcccctgagctctaactcctaactcaataacctcattgctgctgtaacttcctcctggatatccagaaagcacaacagttcaaacccccaactcctgatacccactgcagcccacagcctgctcctgcagcctcccacctcaggagacagcaactccctctcctgggcctccagccaagagcctggctgtcagctttcactcttctccctcacaccccatggccagtccttcagccaatcctgctgctgcttccttcaaaacacacctagacacctaccacatctcccacctccatcagccagaggccactctcagtgcttgcctggattcattccctgctcctattgcaccaaccttctctacacagcagagtgatcctttcattaacatctgaatcagcttatgaaacacctctggtccaactttctagcaaataaaaaagctacagtcaaaatttttggccaggacatggaacaatgggaactcatatttcttgtaggataaaggctcagctgctttgaaggaccaggtggccgtttcttacaaagttaagcattatccctgagatccagcaagtccatcattctaggtatttatttacccaagggaaaaagaaacatatccatgaaaagacgtggacaagaatattcacaaaagccttattaagaatagccaaaaatgagccaggcacagtggctcacacttgtaatcccagcactttgggagaccgaggtggaagccccggagttcaaaaccagtctgagcaacaaagtgaaaccctgtctctataaaaattagctgaatgtgatggtatacacctgtattcccagttactcaagaagcagaagtgggaggatcgcttgagcccaggaggtggaggttgcagtgagccatgatcacgccactgcactccagcctggacatcagagcgagagactgtctcaaaagccaaaaatgagctgggcacattgatgcacacctgtagtcccagctactagggaggctgagatgggaggatcactcgagcccaggagttggaggctgcaattcactatgatcacacctttgaataaccactgcaattcagcctgggcaacagagaaatccctgtctctaaattttttgttaaagccaaaaaggggaatcccaaatatctaccaacagaagaatcggtgaacaaatatgtagtatggagagtacccagcaatgaaagaacatagccaggtggtgtgaatatgagtttcagtagtggagaaaggggttgggagctgagctctgtgtcccggtgttgagaacgtaaacaggtaaatctcaaaaacagtgttggataagagaaatcagaaacaaaaaatgacatactagattattccatttacatgaagtcccagaacaggcagaactggatttgttttcctgagatggagtctcgctgtatctcccaggctggagtacagtggcgcgatctcagctcactgcaacttccgcctcctgggttcaagcaattctccctgcctcagcctcccaagtagctgggattacaggcgcccaccaaacacccagctaatttttgtattttttagtagagacagggtttcaccatgttggccaggctggtcttgaactcctgacctcaggtgatccacccatctcggcctcccaaagtgctgggattacaggcatgagccaccgcgcctggcccagaacaggcagaacttatctgtggtgcagaagtcaggaggcagcaggctgttgggtagggtctatagacaggttaatggtgcctcactgttcccacaatatggctccagcccaggtaaaaagttcaaggggaactctccacaccttctgactctagcctgcgataaaacaggcccttgccatgttatcacctggggtctagatgggacaaaagtgccagacactgattttaaacaaggggcctggagaggatgctgcattaatggagccaggcctggtgagcctctcctctacaaaagccttccggccaggggcaacagctcacatctgtaatcccagcactctgagaggatcactggagcccagaagtttgacaccagcctgggcaacatagcaagacccccatctccactaaaaaaaaaaaatcaaaaaattagtcaggcatgatggtgcacacctgtagtctcagctactccggaagctgaagcaggaggatgacttgaggctgggaagtcaaggctgcagtgagctatgattgcatcactatagcccagcctgggtgacagagcaagaccctttctcaaaaaaaaaaaaaaaaaaaaaaaaaccgtctcaaagcagaggaactggggtttcccattatgtttcaggactacctgagtcacttgccactttaggacagggagcaaggggaagacactaagcagtctgtcttaaacggaccccagagtggctggctcaatgagctcttgcttctaggaggtaggtacccccaataagtcccagtaaggagggggcagtcaaaatcactcacggctgagaccccatctccataaaaagaaaaaaaaaaaatcactcagggtcttttcaaattctatatgtatgaccatacccctctcctcaccaacacacacaaaaaaattaagattttttttccctataataagctactcatatctccaagagaagaaaaagatttcaaaggctcagaataaagcctgtctgcatctttgatttgtttcagttttttctagcagctttattgaagcataattaatatatcatacaattcagccatttaaagtatacaagttttgaggtgggtggatcacgaggtcaggagattgagaccaacctggctaacacggtgaaacccagtctctactaaaaatacaaaaacaaaattagccgagcgtggtagcgggcgcctgtagtcccagctacttgggaggctgacgcgggagaatggtgtgaacccaggaggtggagcttgcagtgagccgagatcgcaccactgcactccagcctgggcgacagagcgagactctgtctcaaaaaaaaaaaaaagtatacaagttttagtagcacttgtgggctattaaaaacaaagtgtacaagtcaatggtgtttagtatattcagacttgggcaaccattacctccatcaatcccaattttcatcatgccaaaaagaaactccacaatccctcca

SEQ ID NO: 2194 - DNA, 6649 bp, Homo sapiens
cagcatgtatcagccgaggtggagctgcggggccctggcatgaaagggtcctcactgagcagcgagtcgtcccccgtgtcctctccggccaccaaccacagctcccccgccagcacacccaagcgcgtgcccatgggccctatcatcgtcccccctgggggccacagcgtgcccagcaccccccccgtggtgaccatcgctccaaccaaaaccgtgaatggtgtctggaggagtgagagccggcaggatgccggctccaggagcagcagtggaggtcgggaacgcctcattgtggagcccccgctccctcaggagaaggcagggggaccagccatcccctcgcacctgctcagcaccccctaccccttcggcctctcccccagctcagttgtgcaggattcccgcttcccgccactcaacctccagcggcccgtgcaccacgtggtgccccccagtaccgtgaccgaggactacctgagaagcttccggccctaccacaccaccgacgacctccgcatgtcctcactgcctcccctcggcctggacccggccactgctgcagcctactaccaccccagctacctggccccacaccccttcccccacccggccttcaggatggacgactcctactgcctgtctgccctgaggtccccgttctaccccatccccacccccggctccctgcccccactgcacccatcagcgatgcacctgcacctctctggggtccgctaccctcccgagctctcccactcatccctggcagcgctgcactcggagcgcatgtctggcctcagcgcggagaggctgcagatggacgaggagctaaggcgggagagggagcgcgagcgcgagcgcgagcgtgagcgtgaggctgaccgcgagcgggagaaggaacgtgagcgcgaacgcgagaaggagcgcgagcaagagaaggagcgtgagcgtgagaaggagcgcgagcgcgagctggagcgccagcgggagcagcgggcccgggagaaggagctgctggccgccaaggccctggagcccagcttcctgcccgtggccgagctgcatgggctgcgtggccatgccactgaggagcggggcaagccctcggagcagctgaccccaacccgagcagagaagctgaaggatgccggcctgcaggcgcccaagcccgtccaacaccccttgcatccggtgcccaccccacaccacacggtgcccagcctcatctccaaccatggcatcttctctctgcctagcagcagtgctgccacagccctgctgatccagcgcaccaatgaggaggagaagtggctggcgcggcagcggcggctgcggcaggagaaggaggaccggcagtctcaggtgtccgagttccggcagcaggtgctggagcagcacctggatatgggccggcccccggtgccggcggaggcagagcacaggccggagagcaccaccaggccaggaccaaaccgtcacgagccaggtggccgtgaccctccgcagcactttggggggccaccacctctgatttcgcccaagccccagctccatgctgcacccacggccctctggaaccccgtgtccctgatggacaacaccttggagacgcggcgggccgaaagccactctctgcacagccacccggctgcatttgagcccagccgccaggcagccgtgccgctggtgaaggtggagcgggtcttctgcccggagaaagcagaggaggggccacggaagcgtgagcctgcccctctggacaagtaccagccacctccgccgccaccacgagagggagggagcctggagcaccagcccttcctgcccgggcccgggcccttcctggctgagctcgagaagtccacccagaccatcctgggccagcagcgggcctccctcccacaggcggccaccttcggggagctcagcggacccctgaagcctggctcgccctaccggcccccagtgccacgggcccccgaccctgcctacatctatgatgagttcctgcagcagcgccggaggctggtcagcaagctggacctggaggagcgcaggcggcgggaggcccaggagaaagggtactactacgacctcgatgactcttacgacgagagcgatgaggaggaggtcagggcccacctccgttgcgtggccgagcagccgcccctcaaactggacacgtcctctgagaagctagagtttttgcaactttttggcttgaccacccaacagcagaaggaggaattggtggcccagaagcggaggaagcggcggaggatgctgcgagagagaagcccgtcgcccccaacaattcagagcaagcggcagacgccttcaccgagactggcgctgtctacccgctacagccctgatgagatgaacaacagtcccaacttcgaagaaaagaagaagttcctgaccatcttcaacctgacccacatcagcgctgagaagaggaaagacaaagagagacttgttgaaatgctccgtgccatgaagcagaaggcactgtcagcagcagtggccgactccttgacaaactctccgagggacagtcctgccgtctccctgagtgaaccagccacgcagcaagcctctctggatgtggagaagccggttggtgttgctgcttccttgtctgacatcccaaaggccgcggagcctgggaagctggaacaggtccggccccaggagctgtcgagagtccaggagctagctcctgccagcggggagaaggccaggctgagcgaggcccctggaggcaaaaagagtctgagcatgcttcactatatccggggcgctgcacccaaggacattcctgtgccgctgtcccacagcaccaatgggaagagcaagccgtgggagccctttgtggcagaagagtttgcacatcagttccacgagtcagtgctgcagtccacccagaaggccctgcagaagcataaagggagcgtggctgtgctgtctgcagagcagaaccacaaggttgacacgtccgtccactacaacattcctgagctgcagtcctccagccgcgcccctccaccccagcacaatgggcagcaggagccccccactgcaaggaagggccccccaacccaggagttggaccgggactcggaggaggaggaagaggaggatgatgaagatggagaagatgaggaggaagtccccaagcgcaagtggcaagggatcgaggccgtttttgaagcttaccaggaacacatagaagagcaaaatctggagcggcaggtgttacagacacaatgtagacgactggaggcccggcactacagcctcagcctgacggcagagcagctctcccacagcgtggcggagttgaggagccagaaacagaagatggtctcagaacgggagcggctccaggcagaactggaccacttacgaaagtgccttgccttgcctgcaatgcactggcctaggggctacctgaagggatatcccaggtgacggtttcccttgcactaggccgaacctatagtatagaaatattatctattttattaccttgaatatttaatatttttcactgggaggtttgaagcttacaaaatgagaatgtgccatgcatgaagcaaaggattccaggctccagaaaaaatgaatgaactcaccttgacgtcaatgcaattgaatcaccgttgtcattcagcgagcaaccaatgtaggattgcccacagtttttctttttaaaggtggttttcgcccttcctctcccacattatttcttaatctgaacatgaaggctccattagcaacactaaaacttgatcattaacagccccctgtgcatatgagtggatcaaaccggttctgttctttcttgtgttgccatgttactatgcctcaagcccagtttgcttttgccgcagcgatggggccagtctcattcctccccaggagtgaaacttgcttcagctgaaaaggttgggtgcattgtcagtaaaaagggcttatttgtttcattttactttcctgcaaaattttcttcaaagcaacaagtcctaggagcacacaaagcaacccaaaggcttttccctggaaaagctctttcttacctaaagataaaaccaattcacaaactgaaggtagctttttattactccgtggggagcatgtacagagctctgtgtatacacagcttcacacccaccagattgttactacagtgggttgggttttcatacagacgtaaattttgagagaaaagtcaaaggtgcttcagccttgtactgtgtatatatattaaaaaaaaaacaaagttttgtatgtttttattactttaactattgttataaaaagcctgccatttttaatatgtggtttgggggatttaaaaaaaaaaaaaccttgcttttagtgtttgtactgctgctggtcaggacattaaaatattgaagtgtttttaaaaattaaagaagaagaaaagtaaaagagcttaccactggcgcctatgcgatcacttcatttttagtttgagttgcaccagaagctgccgtagaaagccatgcgctactgcttacctcctccactccccctgcctgcccccagcatctggacaagctaatagcaaatattacccattgctatcaagggaggagggggtagtctgtagaacccatgtgtgacagtcatgtgcacacatgggcgggggcttttaaaaacctttcaggaagtcaatgatttctgtgattgatataattctaaggtgtctgagagcaggtacagaataggaacttcagaggctttgtttaaacgcaaagctttgtaaaagccacaaggtctgagctgaacccctcctttttgaacttactgtgacaagcacaggaacggtcagaaactgggctcatcacaccaaggcaaagcaacgggcgagtcttcctccttgtcctagttactgcctatggaggcagtgtttagatcaagaaggcctctcttgctcccaagggccctcaccagaggccagggctgccagtcactggtctggggggtggaggcctgagctgagggcagggtgcctgacctgtgtgccggctgctcactgctgtgaccagcagccgagcccttggccctagcccttgctgcgcagaacagcttgctggcagctggcatcgtgtcgctttatctgcccccgcacagtttgctttgtacgtctgccaagaatcttccagttattagcaaactcagacgaatgtaccgccagtattatcagcagtcaacaagcaccttcctctccacagaagcagctggaagagaactcgaggggctgtgctgcaggcctcccctcgaaagacactgggaggtcagcatgttccacaggtgttcagagggagtctgctacaaactatcagggcaaaatctcactggatttctccactgaaaacctacttgaggtttctggtctgaaggcttaagagtcacatcttagcacttccgctctcaggcctcctcctccatcacagatgtctggatgcttttggaaatggccttggctaaagtaaaagggaaaagtagatccgataacttaaaaacgtagctcatcccttaccatccaaggggcactcccttggttggattttctatgacagcacaggggacaggtggcacaccatgagaggtctgcccagggtgggagcagtgtcactgtgctagcaatagttggcttctcccctgtcagtggaaaccccacttctgcccggcccttgagcttcttgcccactgtctccccatccttccacctacttgtggcgatctgagtactctactcttgctcaagaagtaatacgacaatcagaatacaaaccagtaaggcaacacgaataaactaagaaaaaggtaagaactgtctcaaaaacgaaagcacaccacccaagacacagtacccagtcatggtttccccatccaactattagtttcatactttgaaaacttactttcagattattctcaaagaacacagtagcacctaaatctgttttcaattgggcttaaaaattgacatgcaatctcttaagttttttgttcagctacttcacactgagtacctcaaatctgctctggagtcgattatgccacctgtgtgtcaggatgcacatgaaagccctcggctcggtccttagaccatcttcctacattacctggaagggagctgccatctgtccctctgcagagggataccttccaatagtaaattatctggttcctcactgaaacaagttatttttgcttcatatagtcagagtcagactgacatgataaaatatcatgttcctaatctgttgtctcagataagtgaccaagacgggactttccacattttagtctacattctaatcttaaaggaataaagcactgaattgggactaacattctgataggttgcacccttaagagtattcagagagcatcaaaaggagcccacaccttcagcagtgaaggattctaacacagggaatctgcagtttgtagcagaatggtattttcctcaagtagctcataatactgccaaatctcaaaagttaagctgaatttcacaccagatcctacccctttccctgagccacgtgtttcacacaagtgtagaaaatgccagggatccaccacaagatggagatggtcagcacaa

SEQ ID NO: 2195 - protein, 1136 aa, Homo sapiens
MKGSSLSSESSPVSSPATNHSSPASTPKRVPMGPIIVPPGGHSVPSTPPVVTIAPTKTVNGVWRSESRQDAGSRSSSGGRERLIVEPPLPQEKAGGPAIPSHLLSTPYPFGLSPSSVVQDSRFPPLNLQRPVHHVVPPSTVTEDYLRSFRPYHTTDDLRMSSLPPLGLDPATAAAYYHPSYLAPHPFPHPAFRMDDSYCLSALRSPFYPIPTPGSLPPLHPSAMHLHLSGVRYPPELSHSSLAALHSMSGLSAERLQMDEELRREREREREREREREADREREKEREREREKEREQEKEREREKERERELERQREQRAREKELLAAKALEPSFLPVAELHGLRGHATEERGKPSEQLTPTRAEKLKDAGLQAPKPVQHPLHPVPTPHHTVPSLISNHGIFSLPSSSAATALLIQRTNEEEKWLARQRRLRQEKEDRQSQVSEFRQQVLEQHLDMGRPPVPAEAEHRPESTWGPNRHEPGGRDPPQHFGGPPPLISPKPQLHAAPTALWNPVSLMDNTLETRRAESHSLHSHPAAFEPSRQAAVPLVKVERVFCPEKAEEGPRKREPAPLDKYQPPPPPPREGGSLEHQPFLPGPGPFLAELEKSTQTILGQQRASLPQAATFGELSGPLKPGSPYRPPVPRAPDPAYIYDEFLQQRRRLVSKLDLEERRRREAQEKGYYYDLDDSYDESDEEEVRAHLRCVAEQPPLKLDTSSEKLEFLQLFGLTTQQQKEELVAQKRRKRRRMLRERSPSPPTIQSKRQTPSPRLALSTRYSPDEMNNSPNFEEKKKFLTIFNLTHAEKRKDKERLVEMLRAMKQKALSAAVADSLTNSPRDSPAVSLSEPATQQASLDVEKPVGVAASLSDIPKAAEPGKLEQVRPQELSRVQELAPASGEKARLSEAPGGKKSLSMLHYIRGAAPKDIPVPLSHSTNGKSKPWEPFVAEEFAHQFHESVLQSTQKALQKHKGSVAVLSAEQNHKVDTSVHYNIPELQSSSRAPPPQHNGQQEPPTARKGPPTQELDRDSEEEEEEDDEDGEDEEEVPKRKWQGIEAVFEAYQEHIEEQNLERQVLQTQCRRLEARHYSLSLTAEQLSHSVAELRSQKQKMVSERLQAELDHLRKCLALPAMHWPRGYLKGYPR

SEQ ID NO: 2196 - DNA, 7619 bp, Homo sapiens
gtcagggagccgggagcgagccagtggcccgggagtgggcggcgttgcgtttgggtgtgtcctcggcggcgacagcagcaggtgtttcttggccggggccccggaagctccacctccccagcgggcccgagctgccgccgccgagcagccccggggtcctcactgagcagcgagtcgtcccccgtgtcctctccggccaccaaccacagctcccccgccagcacacccaagcgcgtgcccatgggccctatcatcgtcccccctgggggccacagcgtgcccagcaccccccccgtggtgaccatcgctccaaccaaaaccgtgaatggtgtctggaggagtgagagccggcaggatgccggctccaggagcagcagtggaggtcgggaacgcctcattgtggagcccccgctccctcaggagaaggcagggggaccagccatcccctcgcacctgctcagcaccccctaccccttcggcctctcccccagctcagttgtgcaggattcccgcttcccgccactcaacctccagcggcccgtgcaccacgtggtgccccccagtaccgtgaccgaggactacctgagaagcttccggccctaccacaccaccgacgacctccgcatgtcctcactgcctcccctcggcctggacccggccactgctgcagcctactaccaccccagctacctggccccacaccccttcccccacccggccttcaggatggacgactcctactgcctgtctgccctgaggtccccgttctaccccatccccacccccggctccctgcccccactgcacccatcagcgatgcacctgcacctctctggggtccgctaccctcccgagctctcccactcatccctggcagcgctgcactcggagcgcatgtctggcctcagcgcggagaggctgcagatggacgaggagctaaggcgggagagggagcgcgagcgcgagcgcgagcgtgagcgtgaggctgaccgcgagcgggagaaggaacgtgagcgcgaacgcgagaaggagcgcgagcaagagaaggagcgtgagcgtgagaaggagcgcgagcgcgagctggagcgccagcgggagcagcgggcccgggagaaggagctgctggccgccaaggccctggagcccagcttcctgcccgtggccgagctgcatgggctgcgtggccatgccactgaggagcggggcaagccctcggagcagctgaccccaacccgagcagagaagctgaaggatgccggcctgcaggcgcccaagcccgtccaacaccccttgcatccggtgcccaccccacaccacacggtgcccagcctcatctccaaccatggcatcttctctctgcctagcagcagtgctgccacagccctgctgatccagcgcaccaatgaggaggagaagtggctggcgcggcagcggcggctgcggcaggagaaggaggaccggcagtctcaggtgtccgagttccggcagcaggtgctggagcagcacctggatatgggccggcccccggtgccggcggaggcagagcacaggccggagagcaccaccaggccaggaccaaaccgtcacgagccaggtggccgtgaccctccgcagcactttggggggccaccacctctgatttcgcccaagccccagctccatgctgcacccacggccctctggaaccccgtgtccctgatggacaacaccttggagacgcggcgggccgaaagccactctctgcacagccacccggctgcatttgagcccagccgccaggcagccgtgccgctggtgaaggtggagcgggtcttctgcccggagaaagcagaggaggggccacggaagcgtgagcctgcccctctggacaagtaccagccacctccgccgccaccacgagagggagggagcctggagcaccagcccttcctgcccgggcccgggcccttcctggctgagctcgagaagtccacccagaccatcctgggccagcagcgggcctccctcccacaggcggccaccttcggggagctcagcggacccctgaagcctggctcgccctaccggcccccagtgccacgggcccccgaccctgcctacatctatgatgagttcctgcagcagcgccggaggctggtcagcaagctggacctggaggagcgcaggcggcgggaggcccaggagaaagggtactactacgacctcgatgactcttacgacgagagcgatgaggaggaggtcagggcccacctccgttgcgtggccgagcagccgcccctcaaactggacacgtcctctgagaagctagagtttttgcaactttttggcttgaccacccaacagcagaaggaggaattggtggcccagaagcggaggaagcggcggaggatgctgcgagagagaagcccgtcgcccccaacaattcagagcaagcggcagacgccttcaccgagactggcgctgtctacccgctacagccctgatgagatgaacaacagtcccaacttcgaagaaaagaagaagttcctgaccatcttcaacctgacccacatcagcgctgagaagaggaaagacaaagagagacttgttgaaatgctccgtgccatgaagcagaaggcactgtcagcagcagtggccgactccttgacaaactctccgagggacagtcctgccgtctccctgaaaccagccacgcagcaagcctctctggatgtggagaagccggttggtgttgctgcttccttgtctgacatcccaaaggccgcggagcctgggaagctggaacaggtccggccccaggagctgtcgagagtccaggagctagctcctgccagcggggagaaggccaggctgagcgaggcccctggaggcaaaaagagtctgagcatgcttcactatatccggggcgctgcacccaaggacattcctgtgccgctgtcccacagcaccaatgggaagagcaagccgtgggagccctttgtggcagaagagtttgcacatcagttccacgagtcagtgctgcagtccacccagaaggccctgcagaagcataaagggagcgtggctgtgctgtctgcagagcagaaccacaaggttgacacgtccgtccactacaacattcctgagctgcagtcctccagccgcgcccctccaccccagcacaatgggcagcaggagccccccactgcaaggaagggccccccaacccaggagttggaccgggactcggaggaggaggaagaggaggatgatgaagatggagaagatgaggaggaagtccccaagcgcaagtggcaagggatcgaggccgtttttgaagcttaccaggaacacatagaagagcaaaatctggagcggcaggtgttacagacacaatgtagacgactggaggcccggcactacagcctcagcctgacggcagagcagctctcccacagcgtggcggagttgaggagccagaaacagaagatggtctcagaacgggagcggctccaggcagaactggaccacttacgaaagtgccttgccttgcctgcaatgcactggcctaggggctacctgaagggatatcccaggtgacggtttcccttgcactaggccgaacctatagtatagaaatattatctattttattaccttgaatatttaatatttttcactgggaggtttgaagcttacaaaatgagaatgtgccatgcatgaagcaaaggattccaggctccagaaaaaatgaatgaactcaccttgacgtcaatgcaattgaatcaccgttgtcattcagcgagcaaccaatgtaggattgcccacagtttttctttttaaaggtggttttcgcccttcctctcccacattatttcttaatctgaacatgaaggctccattagcaacactaaaacttgatcattaacagccccctgtgcatatgagtggatcaaaccggttctgttctttcttgtgttgccatgttactatgcctcaagcccagtttgcttttgccgcagcgatggggccagtctcattcctccccaggagtgaaacttgcttcagctgaaaaggttgggtgcattgtcagtaaaaagggcttatttgtttcattttactttcctgcaaaattttcttcaaagcaacaagtcctaggagcacacaaagcaacccaaaggcttttccctggaaaagctctttcttacctaaagataaaaccaattcacaaactgaaggtagctttttattactccgtggggagcatgtacagagctctgtgtatacacagcttcacacccaccagattgttactacagtgggttgggttttcatacagacgtaaattttgagagaaaagtcaaaggtgcttcagccttgtactgtgtatatatattaaaaaaaaaacaaagttttgtatgtttttattactttaactattgttataaaaagcctgccatttttaatatgtggtttgggggatttttgtttgtttttcctgtttgggggttttgtttgttgttttggttttttttgggcaaaaaaaaaaaaaaaaccttgcttttagtgtttgtactgctgctggtcaggacattaaaatattgaagtgtttttaaaaattaaagaagaagaaaagtaaaagagcttaccactggcgcctatgcgatcacttcatttttagtttgagttgcaccagaagctgccgtagaaagccatgcgctactgcttacctcctccactccccctgcctgcccccagcatctggacaagctaatagcaaatattacccattgctatcaagggaggagggggtagtctgtagaacccatgtgtgacagtcatgtgcacacatgggcgggggcttttaaaaacctttcaggaagtcaatgatttctgtgattgatataattctaaggtgtctgagagcaggtacagaataggaacttcagaggctttgtttaaacgcaaagctttgtaaaagccacaaggtctgagctgaacccctcctttttgaacttactgtgacaagcacaggaacggtcagaaactgggctcatcacaccaaggcaaagcaacgggcgagtcttcctccttgtcctagttactgcctatggaggcagtgtttagatcaagaaggcctctcttgctcccaagggccctcaccagaggccagggctgccagtcactggtctggggggtggaggcctgagctgagggcagggtgcctgacctgtgtgccggctgctcactgctgtgaccagcagccgagcccttggccctagcccttgctgcgcagaacagcttgctggcagctggcatcgtgtcgctttatctgcccccgcacagtttgctttgtacgtctgccaagaatcttccagttattagcaaactcagacgaatgtaccgccagtattatcagcagtcaacaagcaccttcctctccacagaagcagctggaagagaactcgaggggctgtgctgcaggcctcccctcgaaagacactgggaggtcagcatgttccacaggtgttcagagggagtctgctacaaactatcagggcaaaatctcactggatttctccactgaaaacctacttgaggtttctggtctgaaggcttaagagtcacatcttagcacttccgctctcaggcctcctcctccatcacagatgtctggatgcttttggaaatggccttggctaaagtaaaagggaaaagtagatccgataacttaaaaacgtagctcatcccttaccatccaaggggcactcccttggttggattttctatgacagcacaggggacaggtggcacaccatgagaggtctgcccagggtgggagcagtgtcactgtgctagcaatagttggcttctcccctgtcagtggaaaccccacttctgcccggcccttgagcttcttgcccactgtctccccatccttccacctacttgtggcgatctgagtactctactcttgctcaagaagtaatacgacaatcagaatacaaaccagtaaggcaacacgaataaactaagaaaaaggtaagaactgtctcaaaaacgaaagcacaccacccaagacacagtacccagtcatggtttccccatccaactattagtttcatactttgaaaacttactttcagattattctcaaagaacacagtagcacctaaatctgttttcaattgggcttaaaaattgacatgcaatctcttaagttttttgttcagctacttcacactgagtacctcaaatctgctctggagtcgattatgccacctgtgtgtcaggatgcacatgaaagccctcggctcggtccttagaccatcttcctacattacctggaagggagctgccatctgtccctctgcagagggataccttccaatagtaaattatctggttcctcactgaaacaagttatttttgcttcatatagtcagagtcagactgacatgataaaatatcatgttcctaatctgttgtctcagataagtgaccaagacgggactttccacattttagtctacattctaatcttaaaggaataaagcactgaattgggactaacattctgataggttgcacccttaagagtattcagagagcatcaaaaggagcccacaccttcagcagtgaaggattctaacacagggaatctgcagtttgtagcagaatggtattttcctcaagtagctcataatactgccaaatctcaaaagttaagctgaatttcacaccagatcctacccctttccctgagccacgtgtttcacacaagtgtagaaaatgccagggatccaccacaagatggagatggtcagcacaaaccgattctgttcctctttaaagtgtatattagccacttagcaatctctatattctttcaagtaaccaagctgttgactttcttactacttgcagtagcctgtccccaacttttccatccagtgcttaacctaaaaaactccttaactctgccttgacctgaggaagaccatgctaactggtgttattttgtatgtaccctgtgcttaattctataacagtaaaccccatacgcaggtgggagggaggaacaccggtgcctcggtcactctgggggcagtttagatgctgtgaaattaaacctgttctaagtgtacttgtttgaattaattgtattgtaatattatttgttgaatgtagtaattaggtatttatgaatatattgctgtaatttctgacaacatccaaaaaataaaatcttcctaaattatgttaagaggaaaatcttttttatgatataaaacaaagccaaacaaagaaaagctcaataactatacatctccgcagacggagctgcctccactggctcaggctctaagaggagggcattaggaccccttgccctccacaataacaagtggtttcattctaaaagatccccagatgaaagcaggaggattccaaggaaggctgagatgaaagaacaagtcctatgagctgaaccaagtctgaacagcaccttaaattatggagacctcatcttttggtcccagtcttccaggtctgacccttcagtgtccaaataaccaccaaaacctgcctggcggggacacgtgggcagcaacatggagtgatagtgtgcagcatgc

SEQ ID NO: 2197 - protein, 1104 aa, Homo sapiens
MGPIIVPPGGHSVPSTPPVVTIAPTKTVNGVWRSESRQDAGSRSSSGGRERLIVEPPLPQEKAGGPAIPSHLLSTPYPFGLSPSSVVQDSRFPPLNLQRPVHHVVPPSTVTEDYLRSFRPYHTTDDLRMSSLPPLGLDPATAAAYYHPSYLAPHPFPHPAFRMDDSYCLSALRSPFYPIPTPGSLPPLHPSAMHLHLSGVRYPPELSHSSLAALHSMSGLSAERLQMDEELRREREREREREREREADREREKEREREREKEREQEKEREREKERERELERQREQRAREKELLAAKALEPSFLPVAELHGLRGHATEERGKPSEQLTPTRAEKLKDAGLQAPKPVQHPLHPVPTPHHTVPSLISNHGIFSLPSSSAATALLIQRTNEEEKWLARQRRLRQEKEDRQSQVSEFRQQVLEQHLDMGRPPVPAEAEHRPESTWGPNRHEPGGRDPPQHFGGPPPLISPKPQLHAAPTALWNPVSLMDNTLETRRAESHSLHSHPAAFEPSRQAAVPLVKVERVFCPEKAEEGPRKREPAPLDKYQPPPPPPREGGSLEHQPFLPGPGPFLAELEKSTQTILGQQRASLPQAATFGELSGPLKPGSPYRPPVPRAPDPAYIYDEFLQQRRRLVSKLDLEERRRREAQEKGYYYDLDDSYDESDEEEVRAHLRCVAEQPPLKLDTSSEKLEFLQLFGLTTQQQKEELVAQKRRKRRRMLRERSPSPPTIQSKRQTPSPRLALSTRYSPDEMNNSPNFEEKKKFLTIFNLTHAEKRKDKERLVEMLRAMKQKALSAAVADSLTNSPRDSPAVSLKPATQQASLDVEKPVGVAASLSDIPKAAEPGKLEQVRPQELSRVQELAPASGEKARLSEAPGGKKSLSMLHYIRGAAPKDIPVPLSHSTNGKSKPWEPFVAEEFAHQFHESVLQSTQKALQKHKGSVAVLSAEQNHKVDTSVHYNIPELQSSSRAPPPQHNGQQEPPTARKGPPTQELDRDSEEEEEEDDEDGEDEEEVPKRKWQGIEAVFEAYQEHIEEQNLERQVLQTQCRRLEARHYSLSLTAEQLSHSVAELRSQKQKMVSERLQAELDHLRKCLALPAMHWPRGYLKGYPR

SEQ ID NO: 2198 - DNA, 8828 bp, Homo sapiens
atgtcctccagtgtcccctgcaggcaccaggacaagagctctggtctcccccatcctccagtgtcctgtgggtcaccttttcccggccaccggccttttggggtcacggggtggccctctgccgaagggagaggcactgatggcagcccggtgcgggggacacgcagaggccaggcccgccttgggggcagcgtggctggcggtgcggagcagagagcagctggcagggttcaggctggccgaggacgggccctcattggcagcccgcattttctggaagtggctgcccctgggctcagacctctggtgccgccgccgccgccgccgccgctgtcaccactggccgggagggccaggtcagccgttgctgcgccaggcatgagccatgagcccaagtccccttcgctagggatgctttccaccgcgaccaggaccaccgccaccgtcaaccccctcaccccctcgccgctcaatggcgccctggtgcccagcggcagccccgccaccagcagcgcgctgtcggcccaggccgcgccatcctccagctttgccgccgcgctgcgcaagctcgccaaacaggcggaggagcccagaggggctgctgctggcacaaatggggaggggcagtgggcggctggagctgctgggggccttggccatgtggattctggcctcggacaccctctggactcgctgctgacaggcgggggggctgaggaaaccgggaccccagtggcatccgcttcattcacctccaaggcccacggatgtacctgtgggcattttgtacacatgggctggcgcggtgcgtgtctggaccctgagcgtgacatctcctggtccttgtgggccatctgcggcgtgacagcccttcctgcttctcgtggctggacgacccgggtcgggggagctgggtggggccacgaacccgcagctgcctttctgctccgtcctggagttggaccatggctatgtatcgagtccccccttgatcgcggcagtggctatgtattgagtccccccttgatcgcggcagtggctgtgtatcgagcgcctgctgtgcccctggcgggctcgctgtgcttctcacacacccttcgcctctggtggatgagaactgagcctccggcttgcccgggtcccacgttcaggcggcagcctcccgcagggacgcagcgcccgtctgccaaggcggccgggggcggagaaaacagcaaaacaaacacggaggaaggatcccgcctggcaggcgcgcctcgcgtgggtgtcagtctgcggcggcggcggctctgcaggcgtctggagcccgtctgtctcccgcgcagctgtgaggtggagcctcgttggtggacgcaggccgcggggtcctcactgagcagcgagtcgtcccccgtgtcctctccggccaccaaccacagctcccccgccagcacacccaagcgcgtgcccatgggccctatcatcgtcccccctgggggccacagcgtgcccagcaccccccccgtggtgaccatcgctccaaccaaaaccgtgaatggtgtctggaggagtgagagccggcaggatgccggctccaggagcagcagtggaggtcgggaacgcctcattgtggagcccccgctccctcaggagaaggcagggggaccagccatcccctcgcacctgctcagcaccccctaccccttcggcctctcccccagctcagttgtgcaggattcccgcttcccgccactcaacctccagcggcccgtgcaccacgtggtgccccccagtaccgtgaccgaggactacctgagaagcttccggccctaccacaccaccgacgacctccgcatgtcctcactgcctcccctcggcctggacccggccactgctgcagcctactaccaccccagctacctggccccacaccccttcccccacccggccttcaggatggacgactcctactgcctgtctgccctgaggtccccgttctaccccatccccacccccggctccctgcccccactgcacccatcagcgatgcacctgcacctctctggggtccgctaccctcccgagctctcccactcatccctggcagcgctgcactcggagcgcatgtctggcctcagcgcggagaggctgcagatggacgaggagctaaggcgggagagggagcgcgagcgcgagcgcgagcgtgagcgtgaggctgaccgcgagcgggagaaggaacgtgagcgcgaacgcgagaaggagcgcgagcaagagaaggagcgtgagcgtgagaaggagcgcgagcgcgagctggagcgccagcgggagcagcgggcccgggagaaggagctgctggccgccaaggccctggagcccagcttcctgcccgtggccgagctgcatgggctgcgtggccatgccactgaggagcggggcaagccctcggagcagctgaccccaacccgagcagagaagctgaaggatgccggcctgcaggcgcccaagcccgtccaacaccccttgcatccggtgcccaccccacaccacacggtgcccagcctcatctccaaccatggcatcttctctctgcctagcagcagtgctgccacagccctgctgatccagcgcaccaatgaggaggagaagtggctggcgcggcagcggcggctgcggcaggagaaggaggaccggcagtctcaggtgtccgagttccggcagcaggtgctggagcagcacctggatatgggccggcccccggtgccggcggaggcagagcacaggccggagagcaccaccaggccaggaccaaaccgtcacgagccaggtggccgtgaccctccgcagcactttggggggccaccacctctgatttcgcccaagccccagctccatgctgcacccacggccctctggaaccccgtgtccctgatggacaacaccttggagacgcggcgggccgaaagccactctctgcacagccacccggctgcatttgagcccagccgccaggcagccgtgccgctggtgaaggtggagcgggtcttctgcccggagaaagcagaggaggggccacggaagcgtgagcctgcccctctggacaagtaccagccacctccgccgccaccacgagagggagggagcctggagcaccagcccttcctgcccgggcccgggcccttcctggctgagctcgagaagtccacccagaccatcctgggccagcagcgggcctccctcccacaggcggccaccttcggggagctcagcggacccctgaagcctggctcgccctaccggcccccagtgccacgggcccccgaccctgcctacatctatgatgagttcctgcagcagcgccggaggctggtcagcaagctggacctggaggagcgcaggcggcgggaggcccaggagaaagggtactactacgacctcgatgactcttacgacgagagcgatgaggaggaggtcagggcccacctccgttgcgtggccgagcagccgcccctcaaactggacacgtcctctgagaagctagagtttttgcaactttttggcttgaccacccaacagcagaaggaggaattggtggcccagaagcggaggaagcggcggaggatgctgcgagagagaagcccgtcgcccccaacaattcagagcaagcggcagacgccttcaccgagactggcgctgtctacccgctacagccctgatgagatgaacaacagtcccaacttcgaagaaaagaagaagttcctgaccatcttcaacctgacccacatcagcgctgagaagaggaaagacaaagagagacttgttgaaatgctccgtgccatgaagcagaaggcactgtcagcagcagtggccgactccttgacaaactctccgagggacagtcctgccgtctccctgaaaccagccacgcagcaagcctctctggatgtggagaagccggttggtgttgctgcttccttgtctgacatcccaaaggccgcggagcctgggaagctggaacaggtccggccccaggagctgtcgagagtccaggagctagctcctgccagcggggagaaggccaggctgagcgaggcccctggaggcaaaaagagtctgagcatgcttcactatatccggggcgctgcacccaaggacattcctgtgccgctgtcccacagcaccaatgggaagagcaagccgtgggagccctttgtggcagaagagtttgcacatcagttccacgagtcagtgctgcagtccacccagaaggccctgcagaagcataaagggagcgtggctgtgctgtctgcagagcagaaccacaaggttgacacgtccgtccactacaacattcctgagctgcagtcctccagccgcgcccctccaccccagcacaatgggcagcaggagccccccactgcaaggaagggccccccaacccaggagttggaccgggactcggaggaggaggaagaggaggatgatgaagatggagaagatgaggaggaagtccccaagcgcaagtggcaagggatcgaggccgtttttgaagcttaccaggaacacatagaagagcaaaatctggagcggcaggtgttacagacacaatgtagacgactggaggcccggcactacagcctcagcctgacggcagagcagctctcccacagcgtggcggagttgaggagccagaaacagaagatggtctcagaacgggagcggctccaggcagaactggaccacttacgaaagtgccttgccttgcctgcaatgcactggcctaggggctacctgaagggatatcccaggtgacggtttcccttgcactaggccgaacctatagtatagaaatattatctattttattaccttgaatatttaatatttttcactgggaggtttgaagcttacaaaatgagaatgtgccatgcatgaagcaaaggattccaggctccagaaaaaatgaatgaactcaccttgacgtcaatgcaattgaatcaccgttgtcattcagcgagcaaccaatgtaggattgcccacagtttttctttttaaaggtggttttcgcccttcctctcccacattatttcttaatctgaacatgaaggctccattagcaacactaaaacttgatcattaacagccccctgtgcatatgagtggatcaaaccggttctgttctttcttgtgttgccatgttactatgcctcaagcccagtttgcttttgccgcagcgatggggccagtctcattcctccccaggagtgaaacttgcttcagctgaaaaggttgggtgcattgtcagtaaaaagggcttatttgtttcattttactttcctgcaaaattttcttcaaagcaacaagtcctaggagcacacaaagcaacccaaaggcttttccctggaaaagctctttcttacctaaagataaaaccaattcacaaactgaaggtagctttttattactccgtggggagcatgtacagagctctgtgtatacacagcttcacacccaccagattgttactacagtgggttgggttttcatacagacgtaaattttgagagaaaagtcaaaggtgcttcagccttgtactgtgtatatatattaaaaaaaaaacaaagttttgtatgtttttattactttaactattgttataaaaagcctgccatttttaatatgtggtttgggggatttttgtttgtttttcctgtttgggggttttgtttgttgttttggttttttttgggcaaaaaaaaaaaaaaaaccttgcttttagtgtttgtactgctgctggtcaggacattaaaatattgaagtgtttttaaaaattaaagaagaagaaaagtaaaagagcttaccactggcgcctatgcgatcacttcatttttagtttgagttgcaccagaagctgccgtagaaagccatgcgctactgcttacctcctccactccccctgcctgcccccagcatctggacaagctaatagcaaatattacccattgctatcaagggaggagggggtagtctgtagaacccatgtgtgacagtcatgtgcacacatgggcgggggcttttaaaaacctttcaggaagtcaatgatttctgtgattgatataattctaaggtgtctgagagcaggtacagaataggaacttcagaggctttgtttaaacgcaaagctttgtaaaagccacaaggtctgagctgaacccctcctttttgaacttactgtgacaagcacaggaacggtcagaaactgggctcatcacaccaaggcaaagcaacgggcgagtcttcctccttgtcctagttactgcctatggaggcagtgtttagatcaagaaggcctctcttgctcccaagggccctcaccagaggccagggctgccagtcactggtctggggggtggaggcctgagctgagggcagggtgcctgacctgtgtgccggctgctcactgctgtgaccagcagccgagcccttggccctagcccttgctgcgcagaacagcttgctggcagctggcatcgtgtcgctttatctgcccccgcacagtttgctttgtacgtctgccaagaatcttccagttattagcaaactcagacgaatgtaccgccagtattatcagcagtcaacaagcaccttcctctccacagaagcagctggaagagaactcgaggggctgtgctgcaggcctcccctcgaaagacactgggaggtcagcatgttccacaggtgttcagagggagtctgctacaaactatcagggcaaaatctcactggatttctccactgaaaacctacttgaggtttctggtctgaaggcttaagagtcacatcttagcacttccgctctcaggcctcctcctccatcacagatgtctggatgcttttggaaatggccttggctaaagtaaaagggaaaagtagatccgataacttaaaaacgtagctcatcccttaccatccaaggggcactcccttggttggattttctatgacagcacaggggacaggtggcacaccatgagaggtctgcccagggtgggagcagtgtcactgtgctagcaatagttggcttctcccctgtcagtggaaaccccacttctgcccggcccttgagcttcttgcccactgtctccccatccttccacctacttgtggcgatctgagtactctactcttgctcaagaagtaatacgacaatcagaatacaaaccagtaaggcaacacgaataaactaagaaaaaggtaagaactgtctcaaaaacgaaagcacaccacccaagacacagtacccagtcatggtttccccatccaactattagtttcatactttgaaaacttactttcagattattctcaaagaacacagtagcacctaaatctgttttcaattgggcttaaaaattgacatgcaatctcttaagttttttgttcagctacttcacactgagtacctcaaatctgctctggagtcgattatgccacctgtgtgtcaggatgcacatgaaagccctcggctcggtccttagaccatcttcctacattacctggaagggagctgccatctgtccctctgcagagggataccttccaatagtaaattatctggttcctcactgaaacaagttatttttgcttcatatagtcagagtcagactgacatgataaaatatcatgttcctaatctgttgtctcagataagtgaccaagacgggactttccacattttagtctacattctaatcttaaaggaataaagcactgaattgggactaacattctgataggttgcacccttaagagtattcagagagcatcaaaaggagcccacaccttcagcagtgaaggattctaacacagggaatctgcagtttgtagcagaatggtattttcctcaagtagctcataatactgccaaatctcaaaagttaagctgaatttcacaccagatcctacccctttccctgagccacgtgtttcacacaagtgtagaaaatgccagggatccaccacaagatggagatggtcagcacaaaccgattctgttcctctttaaagtgtatattagccacttagcaatctctatattctttcaagtaaccaagctgttgactttcttactacttgcagtagcctgtccccaacttttccatccagtgcttaacctaaaaaactccttaactctgccttgacctgaggaagaccatgctaactggtgttattttgtatgtaccctgtgcttaattctataacagtaaaccccatacgcaggtgggagggaggaacaccggtgcctcggtcactctgggggcagtttagatgctgtgaaattaaacctgttctaagtgtacttgtttgaattaattgtattgtaatattatttgttgaatgtagtaattaggtatttatgaatatattgctgtaatttctgacaacatccaaaaaataaaatcttcctaaattatgttaagaggaaaatcttttttatgatataaaacaaagccaaacaaagaaaagctcaataactatacatctccgcagacggagctgcctccactggctcaggctctaagaggagggcattaggaccccttgccctccacaataacaagtggtttcattctaaaagatccccagatgaaagcaggaggattccaaggaaggctgagatgaaagaacaagtcctatgagctgaaccaagtctgaacagcaccttaaattatggagacctcatcttttggtcccagtcttccaggtctgacccttcagtgtccaaataaccaccaaaacctgcctggcggggacacgtgggcagcaacatggagtgatagtgtgcagcatgc

SEQ ID NO: 2199 - protein, 1587 aa, Homo sapiens
MSSSVPCRHQDKSSGLPHPPVSCGSPFPGHRPFGVTGWPSAEGRGTDGSPVRGTRRGQARLGGSVAGGAEQRAAGRVQAGRGRALIGSPHFLEVAAPGLRPLVPPPPPPPLSPLAGRARSAVAAPGMSHEPKSPSLGMLSTATRTTATVNPLTPSPLNGALVPSGSPATSSALSAQAAPSSSFAAALRKLAKQAEEPRGAAAGTNGEGQWAAGAAGGLGHVDSGLGHPLDSLLTGGGAEETGTPVASASFTSKAHGCTCGHFVHMGWRGACLDPERDISWSLWAICGVTALPASRGWTTRVGGAGWGHEPAAAFLLRPGVGPWLCIESPLDRGSGYVLSPPLIAAVAVYRAPAVPLAGSLCFSHTLRLWWMRTEPPACPGPTFRRQPPAGTQRPSAKAAGGGENSKTNTEEGSRLAGAPRVGVSLRRRRLCRRLEPVCLPRSCEVEPRWWTQAAGSSLSSESSPVSSPATNHSSPASTPKRVPMGPIIVPPGGHSVPSTPPVVTIAPTKTVNGVWRSESRQDAGSRSSSGGRERLIVEPPLPQEKAGGPAIPSHLLSTPYPFGLSPSSVVQDSRFPPLNLQRPVHHVVPPSTVTEDYLRSFRPYHTTDDLRMSSLPPLGLDPATAAAYYHPSYLAPHPFPHPAFRMDDSYCLSALRSPFYPIPTPGSLPPLHPSAMHLHLSGVRYPPELSHSSLAALHSMSGLSAERLQMDEELRREREREREREREREADREREKEREREREKEREQEKEREREKERERELERQREQRAREKELLAAKALEPSFLPVAELHGLRGHATEERGKPSEQLTPTRAEKLKDAGLQAPKPVQHPLHPVPTPHHTVPSLISNHGIFSLPSSSAATALLIQRTNEEEKWLARQRRLRQEKEDRQSQVSEFRQQVLEQHLDMGRPPVPAEAEHRPESTWGPNRHEPGGRDPPQHFGGPPPLISPKPQLHAAPTALWNPVSLMDNTLETRRAESHSLHSHPAAFEPSRQAAVPLVKVERVFCPEKAEEGPRKREPAPLDKYQPPPPPPREGGSLEHQPFLPGPGPFLAELEKSTQTILGQQRASLPQAATFGELSGPLKPGSPYRPPVPRAPDPAYIYDEFLQQRRRLVSKLDLEERRRREAQEKGYYYDLDDSYDESDEEEVRAHLRCVAEQPPLKLDTSSEKLEFLQLFGLTTQQQKEELVAQKRRKRRRMLRERSPSPPTIQSKRQTPSPRLALSTRYSPDEMNNSPNFEEKKKFLTIFNLTHAEKRKDKERLVEMLRAMKQKALSAAVADSLTNSPRDSPAVSLKPATQQASLDVEKPVGVAASLSDIPKAAEPGKLEQVRPQELSRVQELAPASGEKARLSEAPGGKKSLSMLHYIRGAAPKDIPVPLSHSTNGKSKPWEPFVAEEFAHQFHESVLQSTQKALQKHKGSVAVLSAEQNHKVDTSVHYNIPELQSSSRAPPPQHNGQQEPPTARKGPPTQELDRDSEEEEEEDDEDGEDEEEVPKRKWQGIEAVFEAYQEHIEEQNLERQVLQTQCRRLEARHYSLSLTAEQLSHSVAELRSQKQKMVSERLQAELDHLRKCLALPAMHWPRGYLKGYPR

SEQ ID NO: 2200 - DNA, 50961 bp, Mus musculus
  misc_feature (1)...(50961): n = A, C, G or T/U
gtctctctctgagacagggtcttactgtgtaccccagactggcctcaaacatgatctgcctgcttcagtttcttgagtctcagggactataggtgagtgccaccatgcctcatttaggttacatttattttgatttgttggcttggttttgtttgtttgttttgttttgttttgagactgtttcactatgtagccttggctggcctaaaattcactatgtagaccagggtaggaacccatagaggtctgcctgcttttgcctccaaagaactgggattaaaggcccgtgccaccaagtctggcttaggttagattagtgaagggacatccatgtttagccaaaatggggtaacagccactttctagttgaaacaggcccaaagaattaaacaaagagtataaaacaataggctttaagactgggtatcaggttaacagtaagaagctgacagcgagcttgtgccagcctggggatgtttgccttcatcagctggacctggggtaggagctagggcagctggagatcttagaaaaggagagggagaggagagagcagcacagagaaacctggagatctgcctctgagatgtacgtgtgcacagagcagtcacatgctcgtaatcccagtattccaaacactgaaacagggggatcatgaatttgaagctggcctgaagaaaaataatacttatttaataactccactacttcaaaagaaagcaaaaaaatgaaaaaaaggaacaaatatatgtgtaaaaaatagcaagatgataaacataaacacaattctgtccaactactacatcaactgtaaatggcctaaataacccaattaaaatgtagactatgctggcatagctaacctgccactgtcaacttgctgtggaagagagctatgaatgtaacccaacacacaaaaaaatttacattataaagtagagcttttgttgttttaactgaagtgtaaactttgtagatggccatgtcaataggttggacatgggacctggagagatgtgtcaatggttaagagctcacactgcttttgcagaggatctgggtttgatgcctggctctcacaaggccactatcaactgtcccagggcatcacgtgacctctgcaatcactgcatgttgtgcacagacatacacgcaggcagacacccataaaatatcataaaataaaaataaaggttaacattttttttaaagtttggacatgcctgagttgtacacttctgagtttgagtaaaaaagcaagacccagagctaagatacagtggctcataactggaaccctggaactcaggaatctgggacaggaaaactgacaagaatctgagaccaaatcctgtctccaaaaaaaccaaagacaatgaagaaagtagattttagagccaagactatttccagtgataaagcagttcgtcccctaagaaagaatcacaatctatatcattaataatcataacagattccaggtacaagcagcgaaaattatgccacctcaaggaaaactgagtgctcgttcacatttagtgatctcagcacttctcactcaaagatcaataaaaccaatagacagaaacggaaggaaacaggagacctggacagcgggtgcttgaaaacgttccacccgacagcgctgagtgcacactttttgtggactgtacgtggggcgtttaccaaggttattatcttgggccacgaagtgtgtgtcagtatttagttcaagctgagcatggtgacacacacctggagcctgagcacttgggagatggaggagggaggatcagggattcaaggtcactcttggctgtacttttgagtttgaggcctccaagcttgagacgctgtctttttaaagggtaagcaggggtgctggagagatgactgggcagttaagagtacttgctgctcttaaaggaccctggtttgaatcccagtacccacacagtggctcacaacccttcagaactccagttccaagggatctggtggccttcttctgacctctacagacaccatgcaaacatgcgatacacatacatacatgtaggcaaaacactcatacacatacaattaaataaataaatctttaaagcttacagctgggtggtggtggttcacaccttaaaccccagcactagggaggcagaggcagcagatccctgagttcgaggccagcctggtctacagagtgagttcaggacagccagggatacacagagaaacccagtctcgaaaaactggggggaaaacaaaaccccaaaccccaaaccctgcaatactcaattcatacaaaatatgttctgtgactacaatgaaattaaattaggttaacccagggatttcccctcccgcatcttcagtctggatatttaacctagggtgagggctttatgcatggtagacaagcactctcttgagccacactcccagccccaacctagggatttattgatgggaaagtaattatagggcgtccttcccaaggaccatggtccattgttttgaaaaggaattttgacaaccttcattaatatggagaagagcccagggtacatttatagaatagtttctttgtatctcattgtaatgaatcacatatgttttattggtatatacctaaagcagtctgaaggctggatcttacagaatggttatctaaatttagggttgacttttttttaaagatttatttatctattatatctaagtacactgtagctgtcctcagatactccagaagagggcatcagattttattacggatggttgtgagccaccatgtggttgctgggatttgaactcaggaccttcagaagagcagttggcgctcttaaccgctgagccatctcgccagcccctagggttgactttttacaagaaggaatttgttatctttttaatgaggaacagggccttgctttgtagctcaggatagcctcgaactcacaaccctcagtgctggaatcagaggtctgtgtcactgcgccttgcaggcatttacttcagaagttgaatatgggactttttaaaaaatactaattgctgtataaaattggacattgtacttgaagcctttctacttagatggtgcttttatggtgaaaggcaccagaaatacttgaggccagagagtcccgagagggatgaggggcagagggaaatcaatgtccccagggagatgaaaggacgtggggtaagatgaaagggaagtgccggtgcctgggctctggctaaagtgatggtggctgactcggacatgaggggaggatgacacttccttaccactgacatagtttttttctctattccttccagagctgtgtgcacttcctgtagcgtaaaggtgaggatttgggggaacctttctggtcttggtgaggtaggatgggacaccaattggatgtgttgggcaacccccgccccctgtcccacgaggcccttcatccagtcccttctaagaaggaatctgctcttattcttttccaagactgcaactagtgtgctggcttgttttgattgtaagatagtctctcataaagtctggggtgaccttaaactctctcgactttgaacttcagctcctcttgtctctgcctcctgactgctgtatttcaggcaggaaccacacacctgccccaagactgtataggtgtgtgtgtgtctatgtgtgtgtgtgtgtgtgtctaagtgtgtgtgtgtctatgtgtgtgtgtggtgtgtgtgtgtgtgtgtgtgtgtgtgtgtatgtgtgtctatgtgtgtgtctgtgtgtgtctgtgtgtgtctatgtgtgtctatgtgtgtgtgtgtatgtatgtgtgtgtgtgtgtgtgtgtgtgtgtgtgtcttttaggcagggtctcactatataaccctggatgagctgaaactcactatgcctggccaagactacaaatttttaaaacctttaatcttaaaaccttcaaaggtagtattttatttattttattttagatttttgagacaaggtcttcctgtttatagcactgactggcttggaactggccatgtagaccaagctagctttgaactcagaaatctgcctgcctctgcctcttgagtgctgggattataggtgtgcgccaccttgcccagtcctcgtaagtagtcttaaaatcactacggtgccagagagacgctcacagagtaaagtgcgtgctgctgagacagagggcctggatttggctctcagaacttacatgacagctaacaagtttgcaactccggttccagaagatccgacaccctcttctgtcttccaaggacactgcatgtacatagtgcataacaggcagaacccacatatgcagaaaggaaaaacaaataagcaaaaacattaagcatcatgcgagtaggctggaggcacggtttttctctccccttctaaaaattcttcaataagaccaggctgcatttaggtccatgcctctgcgcagaggtaatggacagagacccctggaagtgtaccgaccgctgtgccgcagcttagaaagaggaaccgacttctgcaaagtctttatttttttttaaatgttttcttttttttttctttttaattttatttatttaatgtctgagtgctctgctgcatatacatccgcctgcctgaagagggcgtcagatccctctatagatggttgtgagccaccatgtgcttgctgggaattgaacgcaggacccctggaagaatagctgttgagccatctcgccatccgtctttatatatgtccctggactacaggaacacatcatccttgtcatgtgaaataatgattgcattcagaactgaaaatcacaccctttgtggtataaaaagatacagttccaaatttatatacatacatacatatatatatatatgtgtgtgtatatatatatataatgtgtgtatgttatgtgtatatatatgtgtgtatacatatacatatacagttcttgaccctaagaaagttacagtttggataagcaggaaatgtattggtgctagatcttcacttaagaatataggggcagccctctgagcctctagtccccaggggtgggaggatggcgtgcctggaggctgctgaggaacttagtcccttccttgtgtcgcagatgaagatgccttccaagaagtatggacacatccctgtctacacacttggctttgagagtcttcagagggtgccaactaccaaagccacgccaacactgaggagagatgccttccagtatgttctgttgctggtatcctgtggtagtgaagggttgaaagtaactgggaaactggggcccgttcccacagacctgtgcagatcaagccaagtaacactagctccagaggctgcgatggaggaaactgagtttgggtggttgggggccatctgggctcgggacctcaatgcccacagaggaagggcctttgtagggatgaacattgattgctgggtggatgaggaaggagagaaggaggaggaaggtgaggggtggcgtggacatgaaaagcaaggtttgagattcagaagtggcaggacaaggcctctgggagatcctagccccggtagggttctctcctctcatggttctttcctggcatctctgcattctagatccctgcagggaccaaagtggcggagcgtggaggaggagttcccccacatctatgcccacggctgtgtcctaaaggatgtctgcagtgactgcaccagctttgtggctgatgtcgtgtgctccagccgcaagagcgtggatgtcctcaatgccactccacgacgaagccgtcagacccagtccctctatatccccaacaccaggactctcaacttccaatgactgttgtgatggcctccccacaccccatcctggaacacagctgccatcagcccccccacccttgcgcatgtacatatatacatatatagatacatttataatatatatatggcctatatttatatacattgtctctttccctacagttcattcagggccaaccttcctccaggactttccctcctcctttcctctcaggactccttgggaagcctgggaggggttggggaatggatctcagagctcagcttccctgcctgccccatgccctggttctcttcagcagtgagtgtgtggcagcttctcttccctgggtagacagaacgccttggttcctcagtgaaccagaggaccaggtctacctctgagtatgtgggattctgctgggaagaagcccaggtgctcccaggtcaagcttgctcttgggtctcttgctagcgctcgctatgtggcttctcctagggagatatgaacgagcatccagatacggcactgacagacctaaggaatgattccactcacgtcagcttgaccaatcaatgagtttactgagcttactgtaatacagcgaggggttactgacaggaacataagtgactctcaggtaaacgcatcaccgagaagccccaccccaacatgggttgtcacccatgaaaactgcatccctgtagttcacacccccagccaattttctacttcctataccaagaccacggtgcagctggggaggggaagggggtggctggaatctcctgtgagggcttggtgacttgcttcctatcagggaaagtcagtaaacctacaaccattgccataagcttgcatatcatgttatttcactgccatggttgcaggcaatgctttctgaaggttagcacggctgctctgccaaatgatggtgatatcatgctcattaagcccagaggcagtcccgacacctggactcaggatgggcctgggctaagctccctgcctgcttacatgcacccagcagaggagggggtctctcatcactccactttacagattaggaaagaaaagctcagtaaggtagagattgattgcttatctcagaacatgccagaactccaacggaagcctgctaactgagccctgctggctgactccagcctccaccagcttgctcagactagaagaggcaccaagggcacaggactgtgacagatggacctgtgcaagttatctttgaaattggaacacccagtaaaagaggctagctcctggcacccattcatctgagcacctcacagaccacctttgtattttgactttttcaagtttaaaagatatgcctatttgggttacatgttcgcttacgttaatttatgtaaactgcatgcgtgcgggagcccatgggaactatcaaactggagttgagggtggctgcgagtcacacatgggtgctaggaactgaactcagtcccttcgcttggtctgcagcaagcactctaaccactgagcagccatctctccggccctttgatttaaaagaacaggcagaaaatgttaggaatcagtactgtcactcagccagcaatgacaacactcacatttaaccaattatggaggctcacacttgttaaaccagcagctgggaattagcatgaggaaggtcactggtttgaggctagtctgggctatgtagcaagctgcagatgtctgagctatacagtgaactctcaaacaagaagccccctcatgttcatgaagtattctcatggacatccagtgccatgaactacgtacagttcttgatctacagactcgaaagcagccacatatccagctcacactccaagcatggtgtcaccagttctgatcctcacacaacacaaatgaaagcaataaactcatattttgggaaacacccagctgagttgcagggtaatgcctgtggttgtacagtgccctacaaccacttctggaggttgtacaacagcctgtcctgtcttatggttgctggtcttttctaaacagtgggttgcatgtcagcccactgagctagcctcagcctcatccatcgggacgatgccaaatacagtggttagaactgagattttcagaaggaccagatctgcagcagtttggggagacacatttggagctagtggttcagggaagatcaactccatccttcagggtccatgacttgtgtctcaggagaggcagttctagactgagacctcccactttattcaaaggtaaggctactgacctgtgtaagctggccacagctctgtgtgtgtgtgtgtgtgtgtgtgtgtgttttcaagacagggtttctctgtatagccctggctgtagaccaggctggcctcgaactcagaaatccatctgcctctgcctcccaagtgctgggattaaaggcgtgcgccaccactgcccagcctggccacagctcttgatcacggatggcacagaagccagcctggtcctgaacagtcagggcggcagcattgagcctgatgcggaagaagctgcaactttaacagtgcgcagggaagagggttggggggatgggcaccttgggacagcagctgtgaaccatcaactttgaagtacctaaagatacttcatagtgtgggcagagggctcagcatccaacccagggacgaaccaagactcctgggggaggcagggtggagtggagcacacggacagtgggacagggggctcacacaagagcaggaactaagggattgctgccctgcctgccttctctgtccttgccaaccgcctacattgtttggactttgggagtcacatgaatgcaaaaccgggttctctctgggaaacttagctcattaaggcgtcttcacctgtaaaaggagatctatctcccaaaatgaagctggaatttaagataagtgactgattgcttctcagccttttggctaagatcaagtaagagcagtgactggcctagccctctcctgctctcaagctggggaaaggtccaacccaaccccagctcattttactttggaggtactcaatcctgactcgtctaggaaagttttccaaaagtataaaaattggggcgtagacatgaagtagctctgtaattccagcccttcagaacaggatttccatagcttcacgggtagccagcgttacagggcaagatcttggtttgggtggtgtactggctagttttgtgtcaacttgacacaggctggagttatcacagtgaaaggagtcaattgaggaaatgcctccatgagatccagctgtaaggcattttctcaattagtgactaaggggtgagggcccattgtgggtggtgccatacctgggcttgggttctataagaaaacaagctgagcaagcctccatggcctctgcatcagctcctgcttcctggcctgcttagtcccagtcctgacttcctttcgtgatgaacagcagtgtgtatgtagtgtaagctgaataaaccctttccaccccaacttgcttcttggtcatgatattttgtccaggaatagaaaccctaagacaggtggtgtttttgttttgttttaaaaaaaggtcggttgttgttgcacacacttttggtcacaacacctgggaggcagaggccagcatggtctgcaaagcgagtcccaggacagtcaagggtacacagagaaactctgtctcaaaaaacaaaaacaaaaagaacatggaaaaagaaaagatctgtgccgaggatccctatgtccttattgtgaaaatcttcctgaattagaatacacataggtagggctgccgtgacttcacaccacggatccacacctaggcagctctcccctcacccaatacccctgtaacatgaccacccctgttgcgttcgcgacaataaaaagcaagccctaacacctaactcggctcggtgcacgttgtggagaggagttacccagtctgaaagaagttaggttggttctattaaggtgaaaactgtccctttgcagtctagtaacaacgtggaggtgggggacatcggacaagtcgcatgggtaggctagcagagaggggttggggactgggtccctcgctcctgtcatagcagaggtctttgcacacgggccttgcggcgtgcgcacctgctctcacggcctcctcgcctgccccacccctgcccgctcgcccccaggctcgcccccgggaatcgcgttcgtgcggagcagcgctctgagcctgcgcgttgctgcccgccgcacagccggctttctgaaagccagccatctccaaagccgaagcaccgcaccacggccgccgctagggcccgactctcgcgagagctccctgggccacccttgcaccttccccgactccacggggaattgggaggaagttccggagagccgcggcgcgcaaacgcgacacgccaatcttgcgccagcgcgccgcaagtgcgcaggcgccgccacactgctgctcttcctcgtccctctgcccacatcaggctgtcgggtcctatgtcgcgccgggccctccggagactgaggggggaacagcgcggccaggaacccctagggcccgacgccttgaagtttgtcctccttgatgacgatgacgcagaggaagagggaccaaaaccggggctgggtggccggcgccccgggggtgcagggaaggaaggagtccgtgtcaacaaccggtttgagctggtgaggagctgggcaacctgaggggggggaaatggtgggggcatgacgtcatgcgaaggggcacaaagttgggtctggactgcagtcgagtgggcggagagaagggactgcgccgcatcggggaaggcgggtcttcagccgcagggtgggtggggtgaggaagccgtgttccccgtccgagatcgagtggaaggtggaagaaaatgccgagcgaaggggctgctaaaggctaacgggggtgccgacaaggggctgagtgacaggactttgctgcagcatagggcgtgtctcgcggctgtgtccagagacgtgacgtgacgcagggcaggacggggcagtgacgtcagagtgggcggggcgtgacatccgagacagctaagggggaggggcactgtggatggcgagtgggaggtggggttcagttgggtctaggcttcactgaaggagtagggttgttctgtccggggcaatgggatggtagggtaggcttggtttcatttctgcgacttgagggaggtctctcttctgcaaacatttcggcttattcatcacagtacttctgtgtgtcccagctacttgtacctatcgtatcgtattcctcgcagcagaaaattgggtagcagtcctgagccccgtgtttttccttacgacagactgacctgggtctgcagtttcatatgtgtataaattatgattctgacttcatgtgtgggcagataatatgtcttttcctcgtatctccaacttccacatatggtaaggtgtcagtggccattttcgagtgagtaaaaagatgtaatgtgtctgagactctcagtcttgcagtgaattgtctcagctagctgggacacacggaagtactgggtcttcctcaagtcgcagatatgaaaccatgtctatcctactgttgcagcacccaagacagcactacccccagttgtccccagctttttatcagttagcaggtttaaaagttcctagcaaagatattgattggtgtgagaaatgtcacagacattttggaagtttggttcagagattgtttatttctcccataaggaaaggaagggatctgtcctgtagtctgtggcgatggtgaaatatgtcttcccttggtacagagaactcgcctgcctcctctgactttgagcctgagagcaacccccattcctactgtttcttctcccttcactagtacttttcttagatttacttttgcttatcatcatttctttttcaagacagggtttctctatgtagtcttggctgtccttgaactcactctgtagactacttagagatgctgtgtctcagactcggaaattcgcgcacttctgcctcctgagtgctgggatcaaaggcatgtaccaccaccacccagctatgtttacttttaaacgtacacaaaaattaggaaaatacaaataacccgtatgcgcccatggcccagtttctgtcagtctacatgcctttaatataattttaatcccatttctcttaagaggtgattgcaaaacagagcctagatatcccatcattcacccatctgtagccttccttgtactgggattcctcccttgacggcagctggggttcactctcagaccttagggatctgagaccattggttcttaaagattttacagctctcctgaacttgtcctgcacttcgctttccctggttctttacggctttcacctttagccttggctccctgtcctctgcttttgcctccctctgtcccatccctgacactctctcaaactggtcagtggcctccttttcatatgtcacgaagttggcaatcttgccacctttggggcccaggctactgactgctcagctgctttgaattacactgctgaggtaggcaagcggggcgggaggctggtgatacaacccagtggtgaagggcccttgctgcttttccagaggactggcgtttgggaccagggaatcacctacagatcagaaccaaggctcgtggtagtagacgcccgatacaaagggaagcagtatttccgaggctgcacctgtcagctgtgagcacagttcaaggcctctggaatattcaatgttgaatatgggtcgtctgccttacggtttggcagacagttctattcctcaaggcagctggggtggggagatttcaacaattgccagttagagaaccaagatgctctgtcccccaacgtctttgcttagctacaggaaattagcatcagaatgtgaggaggtttttaacattcgtagagtttctaacagtgcctcgaatctgtacagtactggggtggagcgagacccctttatctgtctcaggtcacagggagccttcattgctgctgccaccatgagaacgcagtgatagctctccattcccagcaggtgtctgctatgctaagacacttctccctgacctcgcctgttagtaatcttgctcactgtttcagccgccctgacctgcctttgcctcccccgtctggctgcggtcccctttgctgagacgctaacatgagacttcccctcacatgggcatgcttaccctacatgatatgatatgaacaaggtctgttcttaccatgtgcctacctttacagccatccccattcaccttccccctggcactcaccaccggccaggctgcgctgctcttctgtgtacgctgattgtgtcccacagctagcatttgttccttaggaaaagactgctgctcaatgatgtaccaccgcccctcaggacagtgttcacgtctatctgtgctgattttaataaaacaaactactacccaggcagtggtagtgcacgcctttaatcccagagtcagaggcaggcagatctctgagttcaagatcagcctggtctacagagtgagttctaggactgccagggctacacagagaaaccctgtttcaaaacaaaacaaacacttgctattggttttttggtttgttttgtttttatgctatcggatataagagaagcgatcaacttaaggtaagtaacggaaggggttgatagctactgaaggaaaggaaggtgtgggaacggagggaggaaaggcgacgtaatggaacgcgagaaaagatagcgtagtccagggaatgttagagaagggtggcatagcgaagttactggttatcaaatctgaagtacaggaatgggtacttacgcatagtaaacgtaatggagacgtcaggtatcgtactgaaaggttagtcgtaggtaagtggaagggtaatgctacgnnnnnnnnnnnnnnnnnnnncctgtttcaaaacaaaacaaacacttgctattggttttttgtttgttttgtttttttgtttttgtttttttgagacagggtttctctgtgtagccctggctgtcctggaactcactctgtagaccaggttgacctcaaactcagaaatccgcctgcctctgcctcccgagtgctgggattaaaggtgtgcaccaccactgcctggcaacaaacattggctttagacttgtgtacaggtcagtgctgcctgtcctggctatccttctttgtagtctgagagcctggataggacactgaatgcaagtttgggggatgttcttgctaacaggtggggatgtcatgaagcctgtgcgagctcatgggtgcgtcctgtagcatgtgctgggcatgtgatcagcactcaacagagtagatgtgtcctgttggagatggaaggggcagaagagctctgcaaacacatgacggcaagcggcttgtttgatacattcttaggggtggacggggaaggacagagatggcctagggccatgccagactctagattagaagtcatctggaccatttcaatcagaagagtttttaaaaatcagtttgttgggctggagagatggctcagtggttaagagcactgactgctcttctgaaggtcctgagttcaaatcccagcaaccacatggtggctcacaaccatctggattgagatctgatgccttcttctggtgtgtctgaagacagctacagtgtacttaattataataataaaataaaatctttaaaaaaaatcagtttgttgctggatgtaacagctcataccttggatccctgcattcacgaggatttctgagttagaagacatttcggcctacatatcaagttctaggccaaccagagcgacgtgctgagaccctgtctcgagaaaccaactgattgaagttatataataaagtgcatggagtatggataccttcgacgtctgatgtgggctcccccatgcccggccccttgctcaggatgtacctctgaggtttattcagttcttagtgtttattgtttgctccgtgttattgctggacagtaagtaagatactcttgttcgttttgcagggatgggcttgaacccaggctcttgggcaggctctgcagtccttttttttttttttttttttgagatagggtttctctgtgtagccctggctgtcctggaactcactttgtagaccaggctgacctcgaactcagaaatcagcctgcctcggcctcctgagtgttgggactaaaggcgtgcgccaccacgcccggctaggctctgcattcctgtttgtttgtttgtttatatgacttggtcacctgggcatggtggtacacacagaggcaggcagacctctgtgagttgaggctaagcaagtctacatagtaagttctaggacagccagggttacatatagagatgctatctccaagaaaaccaaaataaaaacatagttatatacatatagactatgatatatatgcagtatatagaaatatatgcttaacataaatagataagaaatataaatataaagtaagtatattataaagtaagtaaatataaaatatataagtaaatatatttaatatctgtaataaaatatatatttacataaacatataagtaataaacatattagtaatagaaacataattatgtatatttatggcaaatttatgtttttatatataaatatataagtaatataaatatatagctaatatatgttataaacaacattgtattgtaatatatttatagatataatattaattaatagataatatatttatgtactataaataatatagttatataaatatattactgttatatggtggcgcatgcctttaaacccagcactcgggaggcagaggcaggcggatttctgagttcgaggacagcctggtctacagagtgagttccaggacagccagggctacacagagaaaccctgtctcaaaagaccaaaaataaataaataaataaataaattgctaatgtatataataaatatattagtaatatatttatattacttgtatatgcacatacatatacattcaaaagaaaaaagacaataaatttcaaaaaaattgactcagttgggtgtggtggcacatggaggctaatgtgggaggactgatgtgagttcaaggccagccttgattatgtagtgagactgtctttaataaataaataaataaaaattggatgggctggagagattgatggctcagtggttaagagctctggctgctcttccagaggtcctgagttcatttcccagtaccctcatggcagctcacaaccatctgtaatgggatctgacgccctcttctggtgtggctgaaaacaccgacaatgcactcacttatttaataaataaatcaatctttaacaacaagaataaaagctagagctgggaggggtgacacttgcctttaatcccagcagagccagaagcagatctctgatcagagtctgattagagctacacagagaaaccctgtctcaacaaaacccaaactaaccaaagagttcaatagcacttttgcacatcacagtgatttcataatttcagaacaatgtataaatcactccctaagctcatccaaacctacataagcaggattccccacagttgccgagtatgaggggcactcacatgactgccctcctgacactagttccaactgcagggcttcttaattggtgagaaatacaaaattcattttcttctggcttatggctgcgagcgtgtacagagtgaagcgccagagctgtgcctgcgcctcgctgttgtgcacaggtgacacttctcatgcattgacggtgtgtgtgggcattcccagcctgagtgtccatgttcaggtttctgttgttgtttggccccaggggttacaggatgagctgtgtacatggtatattggtgggattcactaaagggggctttactgtacagctcccatgactgacctgggtctgcagtgcttcaggaggctgagttactgcctttggatacctcagatcatgttgctgccattgacttggcttagggcccctgtaaattctctgatcagtgtatgtcgatgccccagtggagaagacattactgtggaaaattactagaggcttagacgttaactacacagaagccagagcaaaggccgggcctttatttggataggacaaaacgtattacaagactatatgacgtggaactaaatatttactgccaaagcagtatgttcagtggcatgagggtcgtgatgggcaggttcttttttttttaaataatcattatttttatatgtatatatatgctttgtctgcatgtgtgtctgtgtatcacatgtgtgcctggcacccaggacagcttgaagagtgcatttgatcccttggaaccggagctatagatggttataagcatccatgtgggctctgggactcaaacccaggtcttctggaagagcaaccagcgctcttaactgctgagctccctcccgtccagggtcattggttttcgtcctccacctgatgaggccatctctagcaaggtttgcacaatgagtattactgtgaggaaacacagagtttttcagcaatgaaaaagaaaatgtggatgttcccaggtgtttggtcacatctgccctatacatgtctgttattacacctggttcctaggtacataatcactcttcacagtgaagaattctgctggcttctaccatcacagaaagtaaattctcttcacagtgatggaagtcttacagttagaaatagtttattgaatctggagatggctcagtagtcaagagcattagccgctcttccagagaacccagggttaattcccagcacccacatggcaacctacagctgtccaactccagggcttatgacaccctcctcatgtctccgtgggcaccagacatacatgtggtgcgtatgcatgcatgtaggcagaatatacataagagaagaaattaaagtccctgcatggtactcaataaatggggtcactgtggcttggggattctgattgtcatgcctaacagtgatgcacatcttcagtgcactgactaagccagaactcatcacaggcttagagatgtgctggtgctgtgtgggtcaggccctctctgttcccagctctctctgttcacagtcctccctgttcacaatcttccccattcacagtcctccctgttcacagccctctcttttcccagtcctccctgttcccagtccttactgttcactgtcctccccattcacagtcctccctattgacagtcctccccattcactgccctctgtggtttcagctggacggagcctccaggtgtgctgcactgggacgctcagttgctttcatctccccatcgtttttgcagataaacacggaggatcttgaggatgaccttgtggtaaatggggagagatctgactgtaccctgccggactctgtgtcatcagggaacaaaggaagggctaaacatggaaacgcagagaccaagcaagatggaggggccaccaaagcagggtcctcggaacaggtatagaggatcagtcacatggtatagagtcacatggtggtgggacactgtgaggcctgccagagagagagccccgaggtgctggccacatccaccctgcactaccagtttcttgaattcttccgaatttgagctcaattgtttggttgccctgaggaacctgggtgggtttcctgtagaaatctgaaggccagcagttgcataagtgtgtccacctgctcttgtgggagagcctgtgcctgatgacctgatgagaacatgcagcctggtgaagctcgagttctcacgggacttggctacaggaggtgttgtggtggagcagaggcctcatagagcccctggcccagggagccccttctgcaggggtggtagagcacagcagggaatggttgccaaaatgaagatgggatggcagcgtccaggtggctgggtggtcctgtgagtcatctactataggtcatgggaaggcccgaagcacaaggggcagggatatgagggaggacttgatggggactaccacagagtgggttggggattggggttgcttacatttttgtttatttgtatattttatttatatattattttgggtttttgagacagggtttctctgtgtagccttggctatccttgaacttggtctgtagactctgctggcctcaaactcagatcacttgcctctgcctcctgagtgcagggattaaaggcctgcacccccactgtccagcttaaattttttatttttattttttatttgtttttttaaattcaggtctcactgtgcaaccttcactgccctggagatctctatatagatcaggctgacctcaaactcatggagacctgcctctgcctgtctcctgagtgctgggattaaaggctgtgccaccaggcctggctgctgggtagttcttaatgtttatgattttatttctttccattgattaaaatgtctcttccattagtctaatgcaagtggcaaactccgaaagaagaaaaagaagcagaaaaataagaaaagctgcacaggagaatcctcggtatgttgtccaacagtctggttcctctgcctgagccgcactggtccctgctggtgcctcaggctggccctcgcaggaattttctcattgagcacttggctggcttcccaagggtgtagctcagagatgaggagagcaagggggaagaccacgtgcacatcctgcatctggtcagttccctgtgctccctcgtgagcagaccccattcattcttgggctctgtgttctagggcatgtgttccttgctcatctgcccttgcctcgtcctgaggacttgaagtgaatgtagagcccaggcggacccaccattaccagatggtgccgtcctcttccttcctcatgccctgtgtcttaattctggaaaacgtcatagctttgttactgccagtgaggagtcatgactcagtttacccaaggaagtcagctcctccagaagacacagtggtgttctggcctgtggtttccagggccctcttgtctgagtctgggattccagctcttgtggatttctctggtgaaacatgtctcctttgtgtgtctgtgcagcgtatgatactatcttctaggaaataagccaatataaggattctatttcacagtaaatcattctgtcactgggagtatcacattggaggtcaactcagagccaggtgcggtggcacatgcctagaatccgagcagtaggaatcagtgcagtgattaacggcttgttctggcttttaggagaatggactagaagacatcgatcgcatcttagagcggattgaggacagcagtgggttcagccaccccggcccccctccactgagctccaggaagcacgtcctatatgtggagcacaggtatctcgtccgccctcactccatgagagaaaaacggtatttaaaaaaaggcagcctaggttgttgtggtgcacgcctttaatcccagcacttggaaggcagaggcaggcagatctctgtgaattgaaggccagcctggtctacagagtgaattctaggacagcctgggctgcacaaagaaaacctgtctttaaaaaaaaaggcagaagaaagtttactgtctttttagtcaggtctcctggcaaacacctgtaacctcagccccagcgcctgtgaagtagacacagggccagcctgggctgcggaagatgaactccagaaagaaagtgtactgtatgtatggaaagttgggggagtgtacacctagcacgtggcagaacctggatcccatctcctgtacagcttcacactcgttcctcaaaaacaaaacagtgtagagctgggcccggggtttacacttgtaatcctagcactcggtggcccgaggccgagtcccaggtcagcctgggctacagacaaacaaataagcgtattattaagcatctaagaagtgatgaggaagaagcactcctccattttccagagggctttccccctgatgtcttggacccctgaactgtagagcagcgtttcatattcgggtgggtccccatctgttgctcttccatttactcaggagtgtatagttcctgccacagttgttgccagctttttgaaaattggtctcagtgtggtcaaagctgacagggaccccgatcctcctgcctcagccttccaagtcctgagagtataggcgtgcaccaccactacaggacaagctccctacgaggctcttaggtgactttagaaaagtccccagcactgtaaaaggacataacttttctctccaaacccttgtctcacagacacctgaatccagacacggaactgaagaggtattttggtgctcgagcggtcctgggcgagcaaaggtgaggccccgctcagtctgtggtcttcaggttttgtcgctctttctcacactctagatggaagggtgtgttgagggaaactgaggcagaaagtctgccatgggttcttcacagggggaacatatttacatccgtagtgaacgaatagaactcttagcatgaggtttgtgggatcactgaggctcctggagctgtctccgtccttctcaccttcctctccaggatatgtatcgtatttgcagagatgccaaagacaccgtggtcgccgatttaatagttcctagtgtcgggcgttatgccacagggacggcggtgcagtgtgtcccatggttccctaaaggaagagagcacaatggtccacctctgggaaagttgttagaggtgtgcattctctctgcttctccctcagaaggcctagggagccttatctttgtttgactgtttataataggatcagctctgagacccaggtcttgtctctcaagtgcgatgattataggcttatgctgtcattgtcattaatactgataaaatatataaaaatatagtgcttcatgagagtgcatgcataaagtggctgcctgtctgaaaatgtactgtgtacatgcagttacctgcagaagccagagggggcgccaggtttcaggaattgtagttagatagtgtttggagcattcatgtgaggccttctgggagggcagtgagctcgagcattctaagcagctgagcccctttccagtcctagcattgtctttttcagttttgtgggtttttcttggttgtaaacaagaacttcttgttagaaaatggagtccgtgtagccatgtgacctttgactcaccacaccccgagttatttttggtaattgattatagcttgcagggcacgtgccagtctctgctttatgtggccatgagagaactcaactggcgctgtgacatcctgtcttgcatctccggttttctgtgttgtcattctgtgtgctgtgacatgccagggatggttaattaccccagatgctggcttgtgagacatcctgtgagacagacctgctgcctgctgccctcagaggagttgtgcagcttagatcttagactcacacttcgccagggtcaggcctttactttccccatggcaaacgcaagatggtttgggttttgatgttgttgcagctcctatttcttataaggctcaggccttgaggccactgcttttcctttgctccttgctgctgttttctttgtgtttcctatgtggtttcatctgggcttttttgttcttttgtatttatgagataaatctcacaatgtagtcctacttggcctggaacaccagactatcctggaactcagagtaatccacctgcctctgttccccaggtacagtgtatgcccccgtgcctggcttacctatttatttcttgttttatgtttttaatgtaaaatattttaactcttatgtcgtcttttgggaacactgatgaaaaccttttctattttagatgttcccttttggggctgggactctaggctcacttggtagagtgcttacttagcatgcttgaagtcctaggtttatcctcaatactgtataacccagtcatggtcacacacgccatctgcagcacttgggaggagggggaggcggcaggagaaccaggagttcagagccatcctcactgctgagtgaatatgaagctagcctggattacatgagcccctgtttgtctgtctggcaggcagtctggcaggcaggcaggcaggcaggcagtcgttcggtctttctccttcctcaccctttattgagtccagtaacccagccataggatgggtcacatttagggtaagtcttttcggttagttcatagagatatgtcttagtaattctaaatattgtcaaactgacgacgagggcttaccctcctccccactccactgcagccatgctctgtctgtctgccatgttattatagtctatatgtcctgtttctgtaaattagagttactgacattaataattacatttatttcatcctatgtagtgctaggattagacccacagattactaagtccgagtgctcactgagcatccctcagttctggtcctgaacagctgaacagctgcggctatcaccacagccatagttcctttggttgtttttcaagacagggtttctctgtgtgttcctggctgtcctggaactcactctgtagaccaggctggcctcaaactcagaaatccacctgcctctgcctcccaagtgctgggattaaaggtgtgcgccaccacgcccggcttctttaaaactttaagttgggccagagaggttgctcagtgagtatggctgcctgctgccaggttcagtcagaatccgaaaggatggaagaagaaaccaattcccccaagttgtctccaaccttcacactggaaccatggcacgcatatgcccacacatgtgtgcatgagtgtgaacacacatgcttatatcaaatgtaaaaagcaggccagagagcggactcagcagttcagaggtcttgctcttgcagaagacctcattctgttcctggctcccacaaggtggctcacaccttccacaactccacttgcagagacctcgcacccttttctgacctccacaggtaccaggcaggctgtagtactcatacatacatgtttacaaagcatatacataaaacaaatgtaaaaaaaaaacgaaccttttaaaaacactgtccttggctagacaaggtggctcacacatgtaatctctgtacttaggaagctgaagccagggaatctcaagttcaaggccagcctaggccacgtcagcattttcctttcagtctccaccccttcccctgctgctctgaggcaaagcctagagcctcccctcctcctggtatggtcagtgctcttttgggggactcgacttcctgttgagtccaaagctcctccccaggcccctctggacatggccactgctctgtgaggctgcagccttccagtgttcctccaggtttcctttccacctcaggctgcccctcgggtgaaaggttcactgccacgtcctgccagggaccccgctcttgagtcagctgcctgcctcgttccccttcagatctgactgcttctctaacacacttcttttttctctgcagcttttttatttcgttttgaagctttcctatcttattcctggaagtacaacttgttactcattcatttttgccatagctcagatgatccaggaagcatagagaatatcacgtgttcatgggtcactcattcaggtcacccggaagaaaggcagcgcctccccaccttgtcactggtcactgtctgatcatacatgggagggtttggctcctgtgatctatacaagatctatctgaggagcctggccttcttcttcctgcaaacattaggtgttcttctgttgggctaacgctcttcccgagctgcaccggtgcctccagtattcttctccattaccatagcttccatttcccactttgtttgttcaccgcttgtcctcaggtcctcagcactaagccggaaccaagtcatctgatgccctggggagcacgccacagctccctcctgtcagcagagcagcagcacggcctgttcctgtcatcctaagtcaggctttcatttttctggtttccttattgatggtcccaccatttcattcaaggcgtggtcttaccctatagcctcggctgtgtctctactttatgcaaaccaggtcagtctcagactcagagatccacctgcatctgcctcctgaggacggggactaaagcagagccctcaggcctgggcccctccctctgcctgcttattggactgctggacttatttctcttttactttgtttttgctgaggatgaaccgagaacctcctgtgtacttcacctccagcctgaattttctttgtttctctggttatgtggtggtgactacctctgctgccagtgatgtgtcccgtccgcacactagacaccctattcatttctcctccttgtatcttccctgcctgcagcttgactttcacagttcccgtgggcattaggtagaccagcatggtccctaaccaccaaggagactaaaactgtgctgttttctgtttaacccaggcctcgacagaggcagcgtgtgtatcccaagtgtacatggctgacgacccctaagagcacctggccccggtacagcaaaccaggtatgtccccgctggattaggcagtggcttgggtccagaactaatgctctcagttctcctgggcagtcagtttattttaacttgttatggttttatatttcacagccagctaccaattgtgtataatttaaagaaagagggcagcggtatggacagaggcaagagagcatgcagtaaatagccttgctaggtaattggctctatggcatggaaaagtatccggtatcttgattgacagacaaaagagcccctcacagggcagaggcagggaagtgcatattggtgtgtggctatcctggtgatagtggtaaagtgggcccgccccttcccaacagtcctgcctcttctgtgcctgtgaacccctgtgtaggagccctgggcctgtacactggtgcctgacagtatcttctgttgatgccaggcttcttgtcgtgccagcaagagcacctgtgcacctttgcgggcggggctattgaccatgggttcatgccagactccagccttaggtagaaccactttaggacgggaacttagagtactggcctgtttgatggaaatttaccagggaaaaagtccctgtacacccagccttgtctctaaggaacagcgaccaagagtccctggtcataagtcagaaccacgtgctggacccggtgccatgctcactggtgcagtgctcactgtacagccactgtgggtgcttggctcctagccagccatagccacctgcacatttccctctgtgtatactgggtggatctgaggagcaaaacagacaagactctagggcttggtgcagctcacacagctagagcaggcctaagctctctgcaagagctcttggcagatgttagcttatgcctgtcaggagtgtagccccagaactggccaacctgccccagatgctttagttgagctgtattcgtgtgacatacttgtgccaagagcaacaggagagttgtgaatgcctagagcgaggtgccacagcctgccctctctgagcaatattccttgcaggtctatcaatgcggctgctggagtccaagaaaggcctttctttctttgcatttgaccataatgaagaataccaacaagcacagcacaagttcctggtggctgtggagtccatggagccaaataacattgtggtgtgtgaccctgcagctcctgacggatgggcggggggggggggggtgtccaagtgctgtgctgcgcctgggctgggttcttctgggatgtgggagttatgtctgagggacgactgcttccccctagtgtggaagacgcctgtgtgcagagcagtcagatcatgtgttcagaggaagtgtgtttgggactaatggtatatatagcctgtcctcagaggaaagccacactctgctctcaggtcccttctgggaactgtgtgcagggcattgtgggatcttttcccagctgtatttgcctgtagcttcggtgatgccgcacggggactgcttggtccccttctcccaggcagcctgtcccttctgtgatgcagcagcctgcgttctgtctgctccatccttgggccacacttgagtttgcaatcactggggacagcgagaaggtcatcctctgtgcctttgtgtacctgacccctaaatgctgtcgtatttctttggagagaagagaaattctggtttccattgcttttgattggggcatagagagctaattaggaccgtttctgagttctcaccttgaactagatcagtggttcgcctgagccacaccaccacatactctgagttaaaattgaactatgagttaggcatggtggtgcacgcctttaatcccagccctggagaggcagggtcatgtggattgctgagttagaggtcagcatggcatacatagtgaattctaggccagccagggatacatagtgaagcccatatctcaaaaatacatacatacatacatacatacatacatacatacatacatacatacaacaattaaaaacaaaaaaacaaactatgacttcgttgtgatcgtttgtcccagcatgaggcatggccttatgccctttggggagcatgtttcatggggtttctctagggctacgtgctacctgcagcctttctagggctgtcttccattccaacaggttctgctccagacaagcccctatcatgtggactccctgctgcagctcagtgatgcctgccgctttcaagaggatcaagagatggctcgagaccttataggttagccagccccctgcacctgccgccgagcagctccggcttacgggcgatgttccatgaagtgacaaaggatgtttcatagagaaagagtccatatgccataggattcgctcgtgtaaaatgtaccgctcattgtagttagtgtatgcagccattcagccatcaccaccatctgcgtcagtcagttttaaagcaggccctactgtgctctgcggttgtgcgtgaagggtggagtccatgcgtcgagaggccctagcttggcatccttcatttgccacctttgtggtcccagctgtagcatgtatcacacttctacctgtttgttgctatataactctatctgtgtgtagaccaaatcttgtgtatctgtcatcagttgatggacgtttaggttgtttctccggctgttgggaatgtgtctgtgcaggttttgtgacgatgcatgttggcgaacaagtgggtatgtggtattagcagatcacaacaccagttgtatctcctggtataggaagctctccctctgcagcttacagatgtatgttgcgctaagctagagtcattcaggaatgcctaggaagtctgtgtgccatccctcatcagggtcccagttacatgacctccttccttccagaactttccttgttgtgaatttttataatcattgtgtctgtgacacccccctctggtgtttgtggcccacagagagagccctgtacagcatggagtgtgcattccaccccttgttcagtctcaccagtggaacttgcaggctggattatcgcagacctgagaataggtgagtctggtccaccctagagtgagtaacgggtaccctcaagtcacatgagtgactgttgtgatacaagattgtcctgtccctggggatggagcagggctctgaaggtccagggtaccttttaagctttgacgtgtttccagctgaactgcagagggctggctcaaagaaccaggcatcagactggccccaaattaaacctgttcaagttacaagtgagcataacaagccatggagcagtgagacctggagtcatgcttctcatggctttggagggacccccccccccccatcccagggaggttgaagttctgcagcgcactttgtggctgtgtctcctggttctgaaatctgagatgagcttaggtttagcttgacttcagagatcacacagggagcactcccttctggccttctctgagcccgaccaccctctggttttagctcatgcgtgcccttccttccttcctctgcttctctgtatatccctgggctgccgtagcaggccatcccccacctcagtctcatccactgtccactggtgcactgagtgttgggtttggagctccttctctgggctcccaagtacttattgctgtgtctcttctagttaaactcgcacttctttgaaacaggttctgagttacgttcaccaagataactaaagccacccagctttatgcatctacgtgtagtgctatgacaactgttaaggtttgagcatgtgttaagattataattatacaggtttaattgcctgccttttaaatggcaatctgtaaacaactagcaagaagacagatttgcaagcacaatggcacgggcacagtctcagccctgagaggtcagccttggtgacataggaagtttggtgccagcctgggctatgtaagatcgcctcttaagaaaccaggaaagaaaaaagaaaaaaaagtcaggagtttcacatacacttggttagagccaagcgtgtggcacctatgtagagacttggcgtccagcgttcagaagtagctctcttgagccaaggatggttcaaggtcagacttggcaacatagtcagatcccatctaacaccagaaaaacttcattcatgtgtaagtgcgtttataactaaacaaagaggacatatttcctggccacttaggaaattgggggacgggggggacgggacacagtgctggcccctcggccatgttctgttgcttttctgtcactctaacgcacgggaactgtctctgacccaggagcttctacctgaccctctacaagcagatgagtttcttggagaaacgtggatgcccacgtactgcgctggagtactgcaagctcatcctgaggtaagtattcacttggactgtgtggccgcctgtgctcaccacagacccgtggggactccagccgtgacagcatttcctctgtctcccttgttctccacaccctgctgcctccggaagccttgagccagatgaggaccccctgtgcatgttgctgcttattgaccacctggccttacgggcccggaactatgaatacctgattcgcctcttccaggaatgggaggtacgtgtaagccgtggaaactcgggccttgaaaccgcagctgtggctcctttacctttctggcccacactgtgtatgttgggggacagccttaggacaagatgctgggagcctgactcagagtgcaggtagagcaggcagatcaggtagaccgggtagatcgggtagatcgggtagatcagggcctccggcttttttggctcccttgttattacttttgctaaagatccagtcttcctagagggtgttccagcagccctgtgggaacttctgtccacagacctgaactgaaaaagtgtgcaaaacagtggtgctagtggtgatgaaaggttggggacacccaggactccctgtggtcacacaggtagcagtcacgacgcagggtgccatatgagactggcacaggcaacctctgtgcacagactcacattctgcagaagtcctggacagacagacatataaccataaccagtcccttgtaccttgccagatttgcctggaaataaaactggagggtgagctggaccgcactgccacctggcccagctgctgtgagtgctctcagcacacactgggtgccagacagtgccaggaaataacatagactttccagcccgtgactgtggacatgttgcagtgacagtttgagtctattgggttagctaccatgctttaagatcagcctggccattctccataatgcagctaccagacagtttaaaggaagacaggatcccattcaggccacgtttggttcttggaaagaagggatacatgggttctgtgctgcttgcttccagcaaggggccagtaagggagttttcacagtacatattttacattaactagaaagagataaaacatcttaggttacaccctgcttagtatagttggccaggagatttgcttcttgggatctagtttatccttggagctcatgaagaggacaattctaggacatctgtctctaggagacgtcgtgtggggctgcaggggagcagtcatggcttctgtagctgtacgattctgatgataaaggttcccgggacagaaggacgaggacagtgtctcggtcactcaggtgctcactgtagagagtgagggtgtgagtgtgggtatccagagcccacataaaaggcagggcacggtaccgtgggatgtcaccgagttactgcaggcacggggcaggggcatggctagcagtggatgagctgcaggtgtgctgagaggccttgtctcggaacatgaagggagggagccacagagagggctgggtgggcagaagcactaagcccgatgccctggtttgaaccttagaacccacatatggaaggaaggggctgacttctgcagcttatcctctggcctctgcccacgcgccatgctgtgcatacacacacacgtgccccgctgtgcatacacacacacgtgccccgctgtgcatacacacacacgcgccatgctgtacatactcacacacgcgccatgctgtgcatacacacacacgtgccccgctgtgcatacacacacacgtgccccgctgtgcatacacacacacgcgccatgctgtacatactcacacatgcgccatgctgtgcatgggtgcatacatacaccaaatacataaatagaatttaaaggtcagaataatgaaatataattgcagaaagacaccagaattgacattcagcctctgcactcatgtacacatgtgtgcaccatgcatgcatgcacactagagatgacatatacacgcacttctctctcaaaacgcaggaagaaaggagggcactgggaaaggcttgtgttaggtggagtcagatccttctctgctgaattggctttgtgagctttgtgagctttgtgcttccagagctgaggtgcctgaccctagaagctctgagcccacctgctgctgtagcatcagtcatctgactgggctgatccctgcccttctgtgtccctttgtctgttctgcatgtagaaaatggggttttcaggcctggtggtagtggcacacgcctttaatcccagcacttgggaagtagagacaggctgatttctgagtttgaggccagcctggtctacaaagtgagttccaggacagccagggctatacagaaaccctatcttgaaaaaaaggaaaaaaaaaaaagaatatgggttttcttatcttaaggtcagaggcccaagaggaagcagctatggcatcctggcatacactacacatctgtaaagccctgcacatctgtaaagcatgtgctttgtcctcacaagcttgaggctcagacgtcatttcttcctctcttacaggctcatcggaacctgtcccagctcccaaattttgccttctcagttccactggcctatttccttctgagtcagcaaacagacttacctgagcatgagctcagctctgccaggcaacaggcttccctcctgatacagcaggcactcaccatgttccctggaggtgagtgctgccacctcttgtgggtatggaacttgtctttctggggattgagtctagatcacagccctctccgtgctggatgcagagattgcattctcctaaagacttggctgtagctcttgttagacagtaatttacaacctccagtgagcctactgcaagtttggtgaggtgtcgggggagggggagcaatgccctctctgggagttagtttcaggatgggaaagtggggctttttccaaacatggtgcgttaagatagcctgtggtactagagaaagaaagcaaaagtagcatctggagaggcccaaggctagcccaaagaggcccaaggctagcccaaagacgcttcaaagggccttgactatgagtagccaggaagaaaccctggtgcacttcccaggcgttcttaaaatgtggggccaggagaatcggggagagagagcgtgcccaggtctttcctaagagtgcacacagagtggcactgacataagactctgtggccagctgctccctctgttagaaagttccagaattaatgccacattgtagattctgagttccccgagtcttggccagaactcttgcctaccaaccagacctggcagccccaggcagaaatcctatttgctgactcagtgagggccagttctgtcacttagaagctgcctctgccatctggcctgaggtcgcttgcagggctttttctgtcggggaccagctaactgggcatcgattggtagcccgtgctctgtgctgcagagtaagcacgtcttcctcacagcccgctgcagcacgaacatgtccccaggaagtcgctgggacggctgggtcgtgttctggtagactaccagcatgagagcagttcggagatgttagcacttagtgaacagcactacaggcaaagagagccaggttggctcagttggtcatccgtcggatcctggtccctgcagagttagctacagtcaaccccactctctagtctgccttcaagtctagccttcatatgattaaaacgtgcagccatctatgcttgaaggtgatagacaagaagtattccttggatacagatgagatgacatgcatccacttccctagagtttagagctatgttggcgcctagtgtgagagacccagcctatgtaccaattttgtgatggtagtcagaaatgagtcctttaacttcacagcaccctgtggtatatatgacagctaccttccagtgtctcttgtcttttgctgtgaggctgggacaaggactgcacaatccatggaacctttgcttcccctgcagttcttatgccactgctggagtattgcagtgtgcgacctgatgccacggtctcaaaccaccgcttctttgggccggatgctgagatcaggtacagagccctgcagatgtgagactgcgggtcctgctccctagagccctgcagatgtgagactgtaggtcctgctccctagagccctccagatgtgagactgtaggtcctgctccctagagccctgcagatgtgagactgtaggtcctgctccctagagccctgcagatgtgagactgtaggtcctgctccctagagccctgcagatgtgagactgtaggtcctgttccctagagccctgcagatgtgagactgtaggtcctgctccctagagtcctgcagatgtgagactgtaggtcctgctccctaaaagaggagcggatcctgtcctgggggctgcctgcccaactagagtagtggaggatggccctggagccacacccatgtgcagggtgtttctcttgtatgggcaggtgagcagctgccagtctcaagaatgagacccacaggatgcttccttagaagagttgtgggcaggccgtgaagccaggaggcataaacgtgggaagagaaggaaggtggcggggctcgtgaccgttagtatcatgaacttttccaagatttctagactgtcacatttctcagaaacaagaaaaaacacacagaaaaagctgtgtcatgtggtggttgccacccctctgcaggtgcccagtcagcaactgtaggccggcccttggtgctgctccacagaaacagaaacagtcagctgtgtccttcctttctcacattcctgtccacaaagtcctcaagtaactccagccagggggagtgtcctgctcagcagctgaggggtcgccgcctttactccaaggcactaggcttctcctggatatcctttgtctcccatgagctctgagaaaggtccgcttcaacccttgcttttcacagccagcctcccgccttgggccagctggtgagtctgtacctggggaggtcacactttctttggaaagaacccgccattatgagctggctagaggaaaatgtccatgaggttctgcaagcggtggatgctggagaccctgctgtggaggcctgtgagaacaggtgagctgagcctggcaggtccactagaacctagctcagggaggaaccctgctggcctgagtcccttccgtgtgccctcctgggtctttatcgcagacactgggcctcaggtttcagtttagcttttgaaggagccaccagtggtcctgggcatggttgttgctgtgaagtgtgtgggtgttgtgaacttgctgtctgtacagatgtgaggtgagtgggctggtagcacagcttcaacccaagagtgacaagggaagctttcccagaagtcagacaagccagtgcataccggggctctgcagactggctatgggtgacttggcactttgcaccgtgggcgccagtttatctgctgttgtctactctggcctcaggcggaaagtgttgtaccagcgtgcgcccagaaacatccaccgccacgtgatactgtctgagatcaaggaggctgttgctgccctaccctcggtaagaggggtgtggaatgtgtgccggtcatagaatacagctacccactggtcggcctgtgtgccgtatgggttggaactggtgcagaacgtctgcccccatggccagtttctctgggtcttcctcaccatgtgactacctcggtgagctattccagcatggtgtcacactgtctgtgacagagacctaggtcttcctcacagaaccctgcagtagtccctgtaacacacgcccctgcagcagaacctcggctctgccctcacagatccctgtgtttggcctctaaggtgtggccaagggtggatcatttggtgaaccagcagctcagcgggaccctggctcccatccctagaccgtggtctgcagtcagcacagtccatcattggcaacatgagtacagatagtgccacctgtgtaacgtgccctttgccctatgtccactgactggggcaaaatgtcacatgttcccccagactattctctaggagagactgttccacccagacctaaagtttcttggagcagaaacggccacttctgccaggtgttgtcactgcctcccggcagataggtcagctctgaggtgagagcagctgaagctttggaatgcaaaggtggccagcactgctccagaatctgttttgtgtcctctcctaaggatgtgaccacacagtctgtgatggggttcgaccctctgcctcccctggacaccatctactcttacgtcagaccagagaggtaccgcccctgctttgtcctcacgcccacacaacccactttggtactttggggctcgctggggctgcccttacagactagaaggaaaatggcaaacatgggctggacaggccagtccactggggagtagggaaacagtgtgacacggagctcctcgagtccccagaggtctgagcacttccctgtgggttctgtagcaagttgagaagtgcagaataagaagccacctctggcctggtgcactgcagcagacagcagacaccacgcctagaaccaaagatgggcagcagtcacatttgtgtggaacctgtggggaaaacgtctaagaagcacgtgccacactgggaagtgacagtcacctgctttgtagaaaggtgtgccccaaccaaagggtgacaactagccctctgctatgtgcaagctgtctcccaagagcacagtgtaaggtctagtgagtgctgaaggaaggtcgtgtggctttgggggtgggggggtaagcgctgacgtgggcatgcctgttgtgtgcatggggcagcgttagaatctgggtcatgaaagagctctcttcccttccctcctagccttcacggctgccctgcctgggtccattgctcccatgtctgtctcaggcaagagccacaggccttctagaccctgacaggaggtagtgagtagagacttccgttaaagttttagattaatatgagaattttcagtgtgctcagaaacatcctaccaggctgtcatagcccagccattctagtcttctaccatgctcatggggtccccagacataagtgtgaccacactgtgctatagagctgtgcttggcccctgcaggggcctcccagggttgcccttacctttcctgtcatcttttgtgactgacccgtcttccccagcatcatatactgtagtcaccttgtagtctctccatgtgacccagcagatgaggtccctaaagagccagcatctggggctccctccccacttcccttgttgccctcgggcaggctagtagtcagcagtgctgaccccagatcctgatgtgcagtttagggcccagagcctgagttccactcaaaggctgcctgtccccagcagttaagagagtgggtagggacagctgacccgggctggaaccccacagtgtctgttaactttaattttctgacccctttccctcctccctccctccttccctccctctctcccctttcctttcccttgcttcctttctctctctctctctctctctctttctttcttttaattttcaggctgagtccagtcagccacggaaacacaatcgccctcttcttccggtccttgttgccaaattacaccacagaggtatgttgattaagcacgctggtctttcccctcccaagttaacatgggcaagtcctgctcagggtggaggcagaaacgggtgagactgtaccctgcctgtggtgccatgcttataagtggggacttggcctgctggagttgcgtggctattctaaggtgagtggtgtgggctgagaggcggctcagcatcatggtaggttggctttggctaagtgagcgcatctggctttctagagcagctgcttcttcttctgggcagggactttgggaggggacaggctcaatcttggggcctaagttgcctcagccgttgaacccaggatctcaagtctacccagactcaagtctatccccacttagctgtgtctcattgttcagggggagaggctggaggaaggagtggccgggggtccgaaccgcaatcaaggcttgaacaggctgatgttggccgtacgtgacatgatggccaacttccacttcaacgacctggaggtgcctcgggaggacaatcctgagggcgagggggactgggactgaactgtccagatgctgtgcccagagccgtgcagtcacgttcccgaattcatttctggttggagttaaccagttccgagtagaaatgctgaccatgccatcacccgtgtcttttgttttccctctgaagggagtgggttatactctgggtgagcttcctccagtgtcctcagaaacagtcccagaagcagtgcgccccacactgggtgcaccctatcatgtgcctcacacttcagcatttgtaacatggtgcatagaagggttgtcccagggtctgcagtaccaggaccctatctgctccttgctagaggcccctgaaccttccacacatgctacacccagcatgtttgcaacactgaggtcaaacccagggcctggcacatggtctgctgctgactgacagtctcagcctgggaaccttagaggaaactggaagggctggaagtgtcgcagctgggcagctgctcccttagtatgcactgcaaaagccagcggtgctggtgttcgtgtgtaatctcagcattcaagcagagagggggacaagagggttagaagttcaggatcaccctctgctacataattaagttcaaagccagtctgagttatatgagatcccatctcaaaagagatgcatgaggggcctagaattcaaagagacgttaaaaaaaaaagaaattgtcctaagcaggtaaggaatactttacagagattaaagggtatttgatctagggatgagtggggaaccctgaccaagaacccgagtccagtggcaggaacaaagaccatagccaggcaaggccggaggtctgtgtctcataagctgtttgtggaaagctccaggctgctgaggtgttacagctgtgtcaggtgtctcccaggcagcactgacggtttgcatcccacaaagcctagcggaggctctagtctgtggagcagagtcttagctgtgcaatgacagcgagggccccctaaatcttggtccattgatgccttcctgggagtctacgtgtttcagactggatgattgggtttggagtacacataaaacacgctttaggactgagccattctgatgtaacggtactggctggcaggcccgatggcctgaattcagtccccaggactcatgtgctgcacagtgagagctcgctcctgtagcttgtcctctgacctccacacaatacactgccaggtgcacacctacagaattacacccaggaaatggaaaagggacagtttggggttaaagcactgtgcagaggcccaggctgtgaacttaaagcacacatggagggtgactcacaactacccatgattccagctccagtgtacacttaaggaggtctcttaataggtgctctggggcaaggggccctggatgtgactgagcaggggcccagagcactgccccttcagcagaatattgagggctgacttgtttccatctatcagcctaatgtcatagcccattcctaagggggccatttacaggagggactccgtgttcaacgtacatgcctggtaagaggtcacaggtcacatgaattggtgctgaatgtctttttttctccagcatgaattggcaaggccatgaagtctggatacaggctctacaacttctgctcgtgggtcagcaggggcctgggagggcaggcctgaggggcctggggagggcaggcctaagggcatggctcccaccagttgcctcacctatccctgggtttggtgggatgatctacacccagtcctggggagggttactgctgagatgggcctcattcaatgtgagtttccaagttggaatggcctgtggtgagtttcagccaaggggaggaaggactgcctaggaatggatgtatgttgtggaaatgacaagcaagcgcggaaaacctggcatcctgcctcttcctttcagcagctgtaagtccatccggatgaggatgtgacatctggagctgcagcagctattctgcaaccacgtgacaacgaattccaaaatgaagagccatgctctaggaacagtgaagcagaggataccccaggccttcaggaacgtcccacctgcaggcctgtttcctgagaggccatcagatgatcggcttcagaagtgttgctcagccttgcaactgaattcatttctaatggtgaaaaataaaaccagtccttcacaccacctgtggatcatcatcgggaaaagtaactttctgagacagagtctcactgtgtagcccgtagtggcctggagcttgctatgtagaccaggccgccctttactctgtagaccaggctggcctcggagatccgcctgcctctgtctcccaaatgttaggattaaaagagtgcaccaccacacctaacctgcatgtcatctcaacagctttaaagtctggcctgtcacccaggtaggggtgacagtgtgtcccgctcctcccgtacctccctggcccctttcccaagaggcgcctgcctatgtgttctgtgcagaattgttggtcatttgtgcattttcatgtagtcagggagaaaacctgtttgctgcctctcagagaaagttcacaagaaatgaaagactttgaaacaaaaacatggtgatatggcctttttaactttgttttttttttgtgtgtgtgtgggtgttttgcctgagtatgtgtctgtgcactgtgtacgtgcccacagaaaccagaaaaggacatacaaagaggctgttggatcccttggaactggagtcaatatccctttttcctttctatttctttttgttgtttatctatttgcttatttttcgagacagggtttctctgtgtagctttggctgtcctgtcctcctatcctggaacttgcattttatgtgaggctggcctggaactcacagaggtccgcctcctctgcctcctaagtgcttggattaaaggcatgcgctaccatggctcagcaatcacatttcttagtcagcttgtgaatggtgaaaagcaaacctgtgtcctctggaagagcagccagtgctgttcactactgagccagagccatctctttagccccaggcatgggcttcctgggaacctgtgctgtcctgtgtgaccagagccagaagggacatgctcacattgcctgagggctttccagatctaaagacagggctgagcctctccccattgggatgccggctgctctttgcctcacagagagatgcccccttagccagtctgcaggcagtcccccctgctaagtaggtacatgctcctgtgtgccgtgtgtcacgtatgtctcccagggccactgagaagtcagccttgaagcatgagcttgaggctattcggccccatcacagcatagccaaagctggttctcccggctctgctccgctgctcccttccctggaggttctagcagttgtaccatcaacgtccaaacgagtcctgcggcgtgcatagtccccctcctctcaacactcagcagcaggggcttgcagggaggatgtggctgcctctgccagagactctttggttctgcctccctttgaagttagattgtctggagggtaaactgtagttgtctcaaagagttcattctgaagccagaaataccaacgtctctgaaaggctatggcacaggaagttagggcagggggggacacttggtctttcatgtcccagaagtgaaaagtggcctgcagtcccaggatgcctagttatcatgtggcttcagaggctaggcccgcatgcctccacagccacggctctgaccatcccattggacctaagacctccactagaagcagaataaggcacaagttgcaggcggcagacagctgggtgaatgtgacagtgtcagccctgcctctacaggcttccgtggaggcttgggacactcaggccacccagagtcactatatcctcctctgtccctgtgacacaggacacctgagggtgtgaacagtttgtaaatcaggtccaccatccaccagtgtgcagggtggtttggctagatctgctaaagctgaagagtacctgtgtcatgtctgcagggttgtactggtcggggtcatacacataagcacatgtgtgtgtctgccagacggtatacaggacctaccaacagctagtcatgatgaggctggccacaggctgccaaatgtccagcatgggccatcgacatggcggacgctgcacaacctgaatgttttaatcacctaactaacaaggtgccttagtgtgaacaaagtataagcctgaggattcttttctctatgaggttctgagacagacagtggatagtcctgaggcccagggaggcccaacacaactctgctgtaagttgtatcttatcaagcgatccgggaaaatagacctgaccacgtttgacttagagggtgtcacttctatttgtcatttattgcaggagtaaagaccaacgtctgttaatgtatgctttaagtgttgctctgtggcttgggaaccaccttgtgagcagacgttgccagagttggcaaagaaggaactgactcctagttgaacgtggtcgagcacacatttgatgccagcactctggcagcagagggaggcaggtctatttcaggttacatagtgagaccctgtctcaagacaacagaaatgactcttaaggggactgttacagacactgaaagtgccctccagcgaagccctgcctcactcccctgctgcctttcttttctttttttttctttttccaaaacagggtttctctgtgtagccctggctgtcctggaactcactctgtagaccaggctggcctcgaacttagaaatccgcctgcctctgcctcccgagtgctgggattaaaggcgtgtgccaccaccacagcccagcttctgctgcctttcttaagttactctcctcacctgtatgcagaaggggccatccagtgctactgagacagcattggataccatggagagagtccagcagcaaccaagggtgggttgctaccaccactgcgtgctatcctgaccactatgaatagtcacatgcccagctgctggcccacagaggctggagacagatctgccctgatgtggttcctggctccagggctagcatgtgctccacagcggaaatgagactcctcaagggaaggggtggggggtgagactaagaagatgggatgtgactgaccaaagcttgctggccaatagcctcggggccccctctagtcagtcagcttcctaccacacccagaactgtagttaagggaggcttcagcaagcttgggcccatgagggacttaagcatcagctctgccagagctcatctgagccccttggcatagggctctttcctgccttggccctgcctctacttgttgattctcaaagttcttggaccagcccctaaagctaccttgaagtcagtagctgagttgctgctatatgaacacatcttcagcttcaggtggaaatgccactgccattggcacacttctaatggagagtgggaatgaaggtgggaggtaggggtgcctcattcacacccagtggctgcctgaggcagcgcagcctgagagagagagaaaggaggtttcagacaacccaggaaagtgatttttgaagtgggcttggagctttaggtagggccactcagggcaggttctagtgaggttgaatgcctgaaagagattggtaagtcacaggggctttgaacacaaaagggagaggcaagaccctgtgttggagtccaaagctagttttccggtttctcggtgctgcctctgccccctagaggcagcctggggcactacacatccctggcacatgcccatcatgtggccaccctcaggaggaggggctccagggatgagttaaaagattaagagaaaagctcccttcttctccagagtcccgtctaccctggcttggcgagggaaaggaaccagacatatatcagaggcaagtaaccaagaagtctggaggtgttgagtttaggcatgtctctacctgagccacttgggaagagacagggagaacagcagaaggctaagctacttcacactggcagtgagagtccatgagcagagctcagggtcctcagcaggaagtgtctatgccatgccgaggctggcctgtccagccagaaagaacacaagtgtaaaggaaaatcggagcgtgcctgtatggaaagaggccggtctgagggatgtcagagacccccgacaacaacatgaagtgaatcagaagctgggggctgataccacctggagctgcagcctccacagaccgcttcctacttcctgacaagactatgtccactcaggagccccagaagagtcttctgggttctctcaactccaatgccacctctcaccttggactggccaccaaccagtcagagccttggtgcctgtatgtgtccatcccagatggcctcttcctcagcctagggctggtgagtctggtggagaatgtgctggttgtgatagccatcaccaaaaaccgcaacctgcactcgcccatgtattacttcatctgctgcctggccctgtctgacctgatggtaagtgtcagcatcgtgctggagactactatcatcctgctgctggaggcgggcatcctggtggccagagtggctttggtgcagcagctggacaacctcattgacgtgctcatctgtggctccatggtgtccagtctctgcttcctgggcatcattgctatagaccgctacatctccatcttctatgcgctgcgttatcacagcatcgtgacgctgcccagagcacgacgggctgtcgtgggcatctggatggtcagcatcgtctccagcaccctctttatcacctactacaagcacacagccgttctgctctgcctcgtcactttctttctagccatgctggcactcatggcgattctgtatgcccacatgttcacgagagcgtgccagcacgctcagggcattgcccagctccacaaaaggcggcggtccatccgccaaggcttctgcctcaagggtgctgccacccttactatccttctggggattttcttcctgtgctggggccccttcttcctgcatctcttgctcatcgtcctctgccctcagcaccccacctgcagctgcatcttcaagaacttcaacctcttcctcctcctcatcgtcctcagctccactgttgaccccctcatctatgctttccgcagccaggagctccgcatgacactcaaggaggtgctgctgtgctcctggtgatcagagggcgctgggcagagggtgacagtgatatccagtggcctgcatcctgtgagaccacaggtactcatcccttcctgatctccatttgtctaagggtcgacaggatgagctttaaaatagaaacccagagtgcctggggccaggagaaagggtaactgtgactgcagggctcacccagggcagctacgggaagtggaggagacagggatgggaactctagccctgagcaagggtcagaccacaggctcctgaagagcttcacctctccccacctacaaggcaactcctgctcagcccttcagctcattcagcctgggctctcctgctgggacagacatgaagtctctaagttaaaagaatgacagacaagccgggcggtggtggcgcatgcctttaattccagcacttgggaggcagaggcaggtggatttctgagttcgaggccagcctggtcttcagagtgagttccagtgacggccagggctatacagagaaaccctgtctcaaaaaaaaaaaaaaaaaaaaaaaaaaaaaaaaaaaaatgacaaacaagagctaagggggagcaactactcttggtggaagcttctgataagaggatttgtggccatgaaaacccagccatagccatgcagtaggcagcttaaggaagtgagacccttcctcagcacatggagcagaattgtagaatgtgcatcttgcaggaggggcctacccatttgcacaagcggtgtgggactgacctaaaaatggctcctgggaatcccaagaggtgggcacccaactgctcacaccagcaggctactctgtcaagtgcctcctccaccagctgcaggggaggctgttggcttatcactgaccacagcctgtgtggctctgagccaggaagcagttgaaatgctaaggtcagagggagggagcctccttgccatcttccctagctctctccagaagctgagtgaagtttgggtgagaggacagggagagtggtcacattagggagatgggagtctcagaagccacagctagctgcctgcctgatttaggaaaccacggtcccgtcttggcttcctctatgactacaaacttcagatcagagcaagcagcggcagaaaaagtttcctcgtgcctctatggtgacaagaatccctttgttcaggctccttctggttcatccatacactgtagcaggaccgtagcatctcagcccctgatatgacacatccgtaaccttggccagagcctgtccctttcctgcccccaccccaccccccatgtgtaggactttcaacctactttgagctctcctgagaagcccaggggtggagagtccctgaggcacacgtagggtggaccaggaccaggggctgaggtctgtttctatgggacactgcccttctgggaggaggtggggtggtctcagtgctctgtcagatttgggaattagacaagacctttcaggcgtatctgagtcccaggagagtagcacctggggtgaactaagaagcttgcacatccctgagcctttctgctgctacaacctgggattcctgcagcagagtctatcttgagtccccactggtactgaacacttctttgtcctcctccttggggtggcctctcagtctggagtgagatgccctcaaccatcaagtcaggaaatggcaccaggccaggacctagccacactatcagctccagccctgctggactgagattggaagctggttcccggcagggccagcctttgctggaagacaggaccatgagtcagcctttagcctgacaccatagctccctggggacacagagagctctggcctgatgtcatctgtcagagaagcatcccaggcctctggatgcttctaagcatcttctctgtccagacaaggagacagagacagatgctcacccaatacttcttgagccaggccagctggaaccacagaaagccacatcatggacacattgtgggggaggggcatctcttgagaacaaaagacccatttctaaactcggctaacttggatgcttaccctcagagaaagttgtatgcgcagccgctctatccagcgtgcacccgtgcgtgcaaactggacgaaggcatctgcaggtgtttttaagctttttagcggctcttgtgaaatgaatgtttgtggaccattgaagtgtggtactattgtctcagattcttcccgaagaattttctgtcactgaaatatcaaatagtcctcataaggtgtcactggtcctagatgaatattaaatcagtgttgtctgtgaatttgcatgccctcctgattctgcttcccaatgggccccctccacacacagtctccttacctaggtagctccagctcacctcgtgccccctcttcaccctcacttgtaccagaagcacaagggtaccaatgacatcaggcatggctcagacaaaaaaagactgttcgacatgctccactgagtgggttgtatatccttagaatttttcacagagattttcatggagcaggggtacttgccagatactgtgtgtgcatcctcacaccccaggtacatttgcaccctcggcgcagccctttgtggagccgcggactggtagccctctcttctccagaaaatagtgacctcagagttcggagctataatccgccaccgtcctgactagcgtccccaggtctgcacagaggtctcaagaagggtttcgcttcccctgcctctcccacctcaagcgactcggcggactcagagaatatgggtcttgattcttaagcacttgagagaaagaaagaccctcttcacaaagctgcagggtggggatggggcagggacaaaatggggaggcagctactggggtggggcactaaggggcctgggttctattgtccccagagcggattgcccaccggtggcccctcctccgaaggcgcggccagacttgctccgcattgtgcgggcggatctcggtgccggtgctgatgctgcagagcctgccgcattgtgcggcgctccagcattggcccgcagcgcttacatcagccagcgagggcggggcagcctcttataagagggcgcggcggaggctgccgatcctccgcagcctgctgtccgcctgccttttcgtctctagccgcgtgaagtcagcatgagggagatcgtgcacatccaggccggccagtgcggcaaccagataggggccaaggtgaggctgagccgtccggcgtcctgcgtccccacaagcgccagccccagggcggtgggtggagggagagaaaggcgactctgggagccgctagcggaacaaagggaagagcccagccccttgccccgctcctgggaccccggggtccccaatcggttcccctcaatcacgccactctgcactgcgcccaggttgcaggagaaggctgggggtaacccttctgactcgcattcccatccattctgcgcacccacacacaccatcaggtacaggggatgtggttggggggcgccgactgggcgtggccttctttgaggttgccacttaagccttgagtaagatgggtgtgtcgggcaactttgggtggggctctcccctaaaaccataatgactgtacatgcctggatccccactggagaactagacagtcttcagggagcaaggccgccctcatatccccaaccttgttcagctcacccagtttccttgccccaccctgttcctttgttggaggagttcggcctgaactccaatgaccttgatccagaactggactctgaaaatctcccatctctaactgtgcgctcccaaggcctcccagtcgggattgagcacagaacaaagccgactgcaaggattgcctcaatttcccctctattgttagcccgcatccaggtgttgaagccaaggcaaaagaaaaagaaaaagaaaaagaaaaaaacggggggggggcgcggggttggtgcagtgactccgcaatcctactatcattagtgaggtagctgtcctgtttccaagtccttaggagactgttccttacccaaggtcacacagcaagtggcagacagaactacttgattcctgcagaagcccaacctccacttgggttgcatttgagtgggtggggtcagctacctcaatcttctcccttctgaacaacatgaaacgggagctttgtccagatgaatgctggacggggcttagggatgctagttcccaaaggaggaggttgggtagacaggtcctgggagggaggggacgaagcaaagagtacctctggaggctgttgccatagaaaccgggcaggaacaaaaaagctaattaccacgggctgggccagtcacgtggctgacatgtaaattacaagtttggctcttgggtggaggttcctctagttaaaggggaagggaagcggcaccacagagactccctaatcacaggggagacagctgcttctgccctacaagggaaatttgggcggggttgggggggtggcgggtaggggggcatacagaggaagcctaaggcaaggggcctcagatcaaatcaggactcctgggatgatcgctgacagctgccctggcctgaagggagggtgagggctcattaatgtggtcacaggtgccaggctttccctggacgaacatctgctcctgaaagggcctggggtgagtgggggagggaaggtttgccatcggaaggcctgtttggtgagcttgctgcatctgtgctgttctgtgctctcctctgggtctcctgttgagtaagggcctagaagtcaggtccaccacgcccaggctccgtgtgttgcgctatggccacagaacatttctgagtgctggacccagctgaggtctcttatgctcctcagcactgtggcccataggcttgcccattttttttaatatttagggtttttatatatatatataattacgagtgtttaaatttttaatgccaattctttttaacaatgcaaataatgagtaaattttcttccatttccaccggctcccttcttagtaatcagtacaaggcgtttttggcaggttccatccagccctctgccctggaagatctctgagaccagactgaaggcccaggccctgtgggacgttacctgcttagtgtctgccccagggaaaataaacttccttgaccagatttacttcctattttggtagctggcccttgggtcactgctgcgagctacaatggagaaagttctccctagccacctgcagcaactgagggagtgggcacaaagagctgcttttttgcttatcggtctttgggtggtccctgtcttagcacaaaggactgctggcttcagagaggtgactgggtagaagtatgggctgggtggggacagggagagaagtgtgaagccaggagaatttcggggaagcagcagaaggggggccttagcaattcataagtttctcacccgctgtgagcgtgttaaagcaccaggcccaggctggtgcactgttacaccttgtgaagtgtggcatgggtgtcaccctcccttaaggctgagaaagatgagggttatggaagctgagtcactcagcttcagatcacaccatggatttgggcaaggcaggaattttagtctaggtgtgtgcagatgtgtcaaggcaggcggtgacatgtgcccccaccagcagcagatgtgactggtctaccctttgtgtgctccctttgttagggc

SEQ ID NO: 2201 - DNA, 3115 bp, Mus musculus
gctcgcccccgggaatcgcgttcgtgcggagcagcgctctgagcctgcgcgttgctgcccgccgcacagccggctttctgaaagccagccatctccaaagccgaagcaccgcaccacggccgccgctagggcccgactctcgcgagagctccctgggccacccttgcaccttccccgactccacggggaattgggaggaagttccggagagccgcggcgcgcaaacgcgacacgccaatcttgcgccagcgcgccgcaagctgtcgggtcctatgtcgcgccgggccctccggagactgaggggggaacagcgcggccaggaacccctagggcccgacgccttgaagtttgtcctccttgatgacgatgacgcagaggaagagggaccaaaaccggggctgggtggccggcgccccgggggtgcagggaaggaaggagtccgtgtcaacaaccggtttgagctgataaacacggaggatcttgaggatgaccttgtggtaaatggggagagatctgactgtaccctgccggactctgtgtcatcagggaacaaaggaagggctaaacatggaaacgcagagaccaagcaagatggaggggccaccaaagcagggtcctcggaacagtctaatgcaagtggcaaactccgaaagaagaaaaagaagcagaaaaataagaaaagctgcacaggagaatcctcggagaatggactagaagacatcgatcgcatcttagagcggattgaggacagcagtgggttcagccaccccggcccccctccactgagctccaggaagcacgtcctatatgtggagcacagacacctgaatccagacacggaactgaagaggtattttggtgctcgagcggtcctgggcgagcaaaggcctcgacagaggcagcgtgtgtatcccaagtgtacatggctgacgacccctaagagcacctggccccggtacagcaaaccaggtctatcaatgcggctgctggagtccaagaaaggcctttctttctttgcatttgaccataatgaagaataccaacaagcacagcacaagttcctggtggctgtggagtccatggagccaaataacattgtggttctgctccagacaagcccctatcatgtggactccctgctgcagctcagtgatgcctgccgctttcaagaggatcaagagatggctcgagaccttatagagagagccctgtacagcatggagtgtgcattccaccccttgttcagtctcaccagtggaacttgcaggctggattatcgcagacctgagaataggagcttctacctgaccctctacaagcagatgagtttcttggagaaacgtggatgcccacgtactgcgctggagtactgcaagctcatcctgagccttgagccagatgaggaccccctgtgcatgttgctgcttattgaccacctggccttacgggcccggaactatgaatacctgattcgcctcttccaggaatgggaggctcatcggaacctgtcccagctcccaaattttgccttctcagttccactggcctatttccttctgagtcagcaaacagacttacctgagcatgagctcagctctgccaggcaacaggcttccctcctgatacagcaggcactcaccatgttccctggagttcttatgccactgctggagtattgcagtgtgcgacctgatgccacggtctcaaaccaccgcttctttgggccggatgctgagatcagccagcctcccgccttgggccagctggtgagtctgtacctggggaggtcacactttctttggaaagaacccgccattatgagctggctagaggaaaatgtccatgaggttctgcaagcggtggatgctggagaccctgctgtggaggcctgtgagaacaggcggaaagtgttgtaccagcgtgcgcccagaaacatccaccgccacgtgatactgtctgagatcaaggaggctgttgctgccctaccctcgggggagaggctggaggaaggagtggccgggggtccgaaccgcaatcaaggcttgaacaggctgatgttggccgtacgtgacatgatggccaacttccacttcaacgacctggagcagctgtaagtccatccggatgaggatgtgacatctggagctgcagcagctattctgcaaccacgtgacaacgaattccaaaatgaagagccatgctctaggaacagtgaagcagaggataccccaggccttcaggaacgtcccacctgcaggcctgtttcctgagaggccatcagatgatcggcttcagaagtgttgctcagccttgcaactgaattcatttctaatggtgaaaaataaaaccagtccttcacaccacctgtggatcatcatcgggaaaagtaactttctgagacagagtctcactgtgtagcccgtagtggcctggagcttgctatgtagaccaggccgccctttactctgtagaccaggctggcctcggagatccgcctgcctctgtctcccaaatgttaggattaaaagagtgcaccaccacacctaacctgcatgtcatctcaacagctttaaagtctggcctgtcacccaggtaggggtgacagtgtgtcccgctcctcccgtacctccctggcccctttcccaagaggcgcctgcctatgtgttctgtgcagaattgttggtcatttgtgcattttcatgtagtcagggagaaaacctgtttgctgcctctcagagaaagttcacaagaaatgaaagactttgaaacaaaaacatggtgatatggcctttttaactttgttttttttttgtgtgtgtgtgggtgttttgcctgagtatgtgtctgtgcactgtgtacgtgcccacagaaaccagaaaaggacatacaaagaggctgttggatcccttggaactggagtcaatatccctttttcctttctatttctttttgttgtttatctatttgcttatttttcgagacagggtttctctgtgtagctttggctgtcctgtcctcctatcctggaacttgcattttatgtgaggctggcctggaactcacagaggtccgcctcctctgcctcctaagtgcttggattaaaggcatgcgctac

SEQ ID NO: 2202 - protein, 697 aa, Mus musculus
SPPGIAFVRSSALSLRVAARRTAGFLKASHLQSRSTAPRPPLGPDSRESSLGHPCTFPDSTGNWEEVPESRGAQTRHANLAPARRKLSGPMSRRALRRLRGEQRGQEPLGPDALKFVLLDDDDAEEEGPKPGLGGRRPGGAGKEGVRVNNRFELINTEDLEDDLVVNGERSDCTLPDSVSSGNKGRAKHGNAETKQDGGATKAGSSEQSNASGKLRKKKKKQKNKKSCTGESSENGLEDIDRIRIEDSSGFSHPGPPPLSSRKHVLYVEHRHLNPDTELKRYFGARAVLGEQRPRQRQRVYPKCTWLTTPKSTWPRYSKPGLSMRLLESKKGLSFFAFDHNEEYQQAQHKFLVAVESMEPNNIVVLLQTSPYHVDSLLQLSDACRFQEDQEMARDLIERAKMECAFHPLFSLTSGTCRLDYRRPENRSFYLTLYKQMSFLEKRGCPRTALEYCKLILSLEPDEDPLCMLLLIDHLALRARNYEYLIRLFQEWEAHRNLSQLPNFAFSVPLAYFLLSQQTDLPEHELSSARQQASLLIQQALTMFPGVLMPLLEYCSVRPDATVSNHRFFGPDAEISQPPALGQLVSLYLGRSHFLWKEPAIMSWLEENVHEVLQAVDAGDPAVEACENRRKVLYQRAPRNIHRHVILSEIKEAVAALPSGERLEEGVAGGPNRNQQRLMLAVRDMMANFHFNDLEQL

SEQ ID NO: 2203 - DNA, 57802 bp, Homo sapiens
  misc_feature (1)...(57802): n = A, C, G or T/U
tcagcagtctgaagaaggggaaggtgaggctgcctagacgtggggctacgctcttgcccgctgggtcaggggcgggtgccgagagggccagttcccaggactgtttgctcatgatctggttgggagccctgagggggtagcagggacagggcgggaccccagggagctttggacaaagcggggctctaaccagtctctcctgacagatttgctgctgctgccgggccaagttcccgctgttctcgtggccgcccagctgtctcttctgcaagaggtgagccttccctttagctgtcagttcacaagggaaggaggaggcgagaaacctcggggcagtaccgcccacagaacttcctgtgattccaggaatgttctagcatgttcgatggctgatgagtccacaagatatggttagtacgaatgaggagttaaattttaaattgtatttaaattaaattaaatttaaatagctaagcaactcccagtttcagccaagatggggtaataggcatcttccacagccaagaacaaacaggatgtgaaacaatggttttcaagacagcaggcaacaaaaaggaaacacaacggggcaagcctgccatcaccacagtcattgcctggagagtttctaggtcatgagccacagctgccggactccccagatggaggaggtcaggctgagaatccagggagaccacagcagctcgagtccgccgtgtagaactccagaggagagggctgcgccgagaaagcctcagagaaggtccccctctctgaaggaaatgactgaaggctgcagaacatttatcctaaagcagagattggcagactatagccacgggccaaatctggtcctcggcctgttttgcaagtaaaatctcactggacacagccacacccatttattactcgctcagccacgcctaaaaggtttattctctggccctttacacaaaaaatttaccttcccttgttctaaagatctgaagggacggtgctcaggggcaggaatgagtaacatcggtttccaccggccacaggcagaaatgtcataattcacagggcactaactggaatgcacacaaaggactcgcctcactaacgtggagtaagtagcccaaagtgattgttgctctaggcctgactgatacatcataaaagcaagacctgaaaggatcaaactgttcacaagtatcttaactgattctgagaacaaagctcaagaataagaattttttaaacatcaacaaaaaaacaaaccagtactcagcaagataaaatgtgtggcatgcaaaaaacaagacaaaattaattacaatgtattgtgggttttgtaacacgtgtgtaagtagtgttgataacagcagttagcatgaaggtcagggagaggggaaaattggaagtatactttttttccttttttttttttttttttttgagaaggagtctcgctctggcgcccaggctggagtgcagtggcacgatcttggctcactgtaagctccgcctcctgagttcccaccattctcctgcctcagcttcccgagtagctgggtctacaggcacctgctaccactcccagctaattttttgtatttttagtagagatggggtttcaccatgttagccaggatggtctcgatcccctgacctcaggatctgcccacctctgcctcccaaagtgttgggattacaggcgtaagccaccgcgcctggccagaagtatactattttaaggttcactatggtaaggtgaatcactatgataaggtatagtaaggtattatacacgctatacaaatattacttaaaggtagactgtgataagttaaagatgtataccataagtcctaaagcaaccactaaaataaaacagttacagctaataagccaacaaaggagataagatgggaccataaacagtaattaatccaaaaaaaggtaggaaaagaaggagaacaaacaaatgagtcaaaaacaaaacaaatagcaaatgacagccttaaacacaactgtatctcgcatcacattaactgtaagtcatccacacgacccaagtaaaagttagaatttcccagactgaataaaaaagtaaggctgggccgggcgcggtggctcacaccttgatcccagcactttgggaggccaacgctggcagatcacgaggtcgggagatcgagaccatcctggctaacacgatgaaaccctgtctctactaaaaatacaaaaaattagctgggcgtggtggcgggtgcctgtagtcccagctactcgggaggctgaggcaggagaactgcttgaacctgtgaggtggagggtgcagtgagccgagatcgcgccactgcactccagactgggcaacagagggagactgtctcaaaaaaaaaaaaaaaaaaaaaaggtaaggctggatatggtggatatggtagctcatgcctataatcccagcactttgggaggctgaggtgggaggatcacttgagccaaggaggtcaaggctgcagtgagctatgacggtgtcactgcactccagcctgggtgacagagcaagaccctgtctgggaaaaaaaaatcacctaattttatctgtaaaattatgtatatttctgttgatatatgcttggaaaagcctggaggatggaaaccattactagcagggatcacttctgagcatgtggtgtctacattttaattctctcatgtttgaattttttttttttatttttttgagatagagtttcactcttgttgcccagtcggaagtgcaatgccgcgatctcagctcactgcaacctctgcctcccaggttcaagtgattctcctgcctcagcctcctgagtagctggcattacaggcatgtgccaccacacttgctaatttcgtatttttagtagagatggggtttctccatgttggtcaggttgatctccaactcccgacctcaggtgatcgcccaccttggcctcccaaagtgctgggattacagcggtgagccaccacgcccagccttgaatttttttttttttcttttttcttttttgagatggaatctcactctgtcacccaggctggagtgcagtggcacaatctcggctcactgcaagctccacctcccgggttcacgccattctcctgcctcagcctcccgagtagctggaactacaggtgcccgccaccaggcctggctaatttgtttgcatttctagtagagacggggtttcaccatgttagccaggatggtctcgatctcctgacctcgtgatctgcccatctcggtctcccaaagtgctgggattacaggcttgagccaccgcgcccagccttgaattttttataagaaggtatttatttttgaaatcagatatgggaattaaaacaaaattgaatcactgtttaaaactgagcatctcagttgaggcccctctagcttccatggtgcttttatggtgagtagtgtcaggtacacaccaatgtctacacgtcttcttagaaggaatcttagatgtctttccaagacagtgtgcaagttttttttttgttttttgttgttgttgttgtttgctttttgttttttttgagacagagtctctctctgtcacccaggctgcggtgcagtgccatgatctcggctcactgcaacttccgcctcctgggttcaagcaattctctgcctcagcctcccgagtagctgggattacaggtgcccgccaccatgcccggctaattttttgtatttttagtagagacggggtttcaccatcttggccaggccgatgttgaacacctgacctcgtgatccacctgccttggcctcccaaagtgctgggattacaggcgtgaggcatcgcgcctggccgacagtgtgcagtttttaaagacccttgtaggtttttgtttttaaactttccaaaagtatgtgacccatcatggcttggttcagaaagacccatcatgccttggttcagaaacaaaaatctgcttaagagggacttttaccaccatttttttttttttttgagacagagtttcgctcagtcccccaggctggagtgcagtggcgtgatctcagctcactgcaacctccacttcccaggttcatgccattctcctatctcagccccccaagtagctgtgattacaggtgcctgctgccacgcccaactcatttttgtatttttagtagaaacgaggtttcaccttgttggtcaggcttgtctcaaacccctgacctcaggtgatccacttgccttggcctcccaaagtgctgggattacaggcgtaagctaccacatctggcccaccaccactatgtttaaaccttactctatatcctaccacttggcaatagaaaacttggcaggagaaaactcctggagccatccttcctgagagaatgccaaggagcacatatattttgggtggatacctaagtataaagaaaagcaagattttggagtaaaataaagtactgaagtaaccaagcatcaggcagaaggcaaggatggtttgacctcggatgcgtggaggccgggatgcgactgtttctcagctgtttgtgggcttcctccctgctgatgctgcatttcctctgttcccttccagagccgtctgcacttcctgtagcataaaggtgaggaccatgtgggatctctggggtctgagcaaggcagatgaggggctccactggctttgattggatgtgttggatgatgctgcctcaccaggcacctcatccatttcctttcaggcagaatccattcctatactttccaagatagtgtgcagtttttaaagacccttacaggtttttgtttttaaacattgcacgttagtagcctcgtgccaaaaaacccttcacttcccctctaaaagtcctaccttcttacattctataactttttgggtgttttaggaggggcttcttattgcagttgaggtgtgtgcttatgtgcaggtgcacagaggtaaagggatcctaacatttaaaagtatgtcagctgggcacggtggctcacacctgtaatcccagcattttgggaggccagtgaggctggcggaccacttgagaccagcctggccaacatggtgaaaccccatctctactaaaaatacaaaaaaattagctgggcatggtggcacgcacctgtaatcctagctactcaggaggctgaggcatgagaattacttgaacccgggaggtggaggccacagtgagctatgattgtgccactgcactacagcctgggtgacagagactccgtctcaaaaagacaaaatacaaataaaagtatgtcaccagccaggcgcggtggctcatgcctgcagttcctgcactttgggaggctgaggtgggaggatctcttgagcccagcaaattcaaggctgcagtgagtatggctgtgcctctgtactccagcctgggcaatagagcaagatctgtgtcttaaaaaaaaaaaaaaaaaaaaaaatatatatatatatatatatgtatgttacccctcaggcctcagttcagaagcaaaactctgcttaaggagtactcttactaccactatttttaaatcttactctacatcctgccacttggcaatggaaaaacttccacctcatccatgttaaatgttgattatgtgcagggtaaggtggcaggtcccgtatagtataaaaagggaaagttcttgccctctaaggagcccctgtccagatgagcaggaaacgtggcaggtcccgcatggtataaaaagggacggttcttgcgctctaagaagcccctgtccagatgtgcagcaagcaggaaccccgtgccagtcttcagccaaaaggcacagaggagacatcggagagcacagggacagagaatattctccaggaagccctggctgccacgcaggtcccagactggggagggaggtcccctagcactgagtgtacctgaatgtctctggtggtgcctggttcatacctcctccctctgtgctgcagatgaagatgccttctaagaaatttggacacatccctgtctacacactgggctttgagagtcctcagagggtatcagctgccaaaaccgcgccaatccagagaagagacatctttcagtgcgttcttcgccttgctgctgatgtcactgtggtggtcgggcgtgaagaggaacttgggagctggggtggagggggctggctttgtctgtttgctaggacaccccaaggaaatggaaatgcaaggcagagacggatcgttgtgtagggctctgggaggctgagcagtatgagatggaaactggacttgggtggtcagggaacagtctgctgagatgaacactgctagctgtgtttgttgcctgagggccaaggggaggcctagggtgaaaggcagccaggagggggctgtggcatgcacaagcagggaggggggtgtggcaccctggctggctcctctccctgagtgccctctcccacttcccaggtctctgcaagggccacagtggcagagcgtggaggaggcgttcccccacatctactcccacggctgtgtcctgaaggatgtctgcagtgagtgcaccagctttgtggcagacgtggtgcgttccagccgcaagagcgtggacgtcctcaacactacgccacgacgcagtcgccagacccaatccctctacatccctaacaccaggactcttgacttcaagtgacagccccaggtggccaggcctccaggaggcaccaggcaggccctgtatcaggctaggacgctctgagctgtgcatgtacatatatacatatatagatacatttataatatatacacacagtctatatatttatatacactgtttcctggccccagagctcatttgggttcaggcgcacttcaaaaccctccctgggggaggctgtttcttctcaggattccttgccagggaggaaggggagggaacagggtgggttttctcactgaagagagaaagcagaaggttctagatcctggcacagactgcatcccatgttcccatgctcttctccgtccccaggaatgcgaacggcagtttcccttccccagtggacgtctaggtggggacagggtatcttggctcccagctggaccagagtgccctgcttgcctctgctctccctttgtggggactcaggcagcagaggcatctgggaagtctctgagtaggcagggtcctcctgggaggcacccccacctgtttgaaaggtctggccaggcgtggtggttcaggcctgtaattccagcactttgggaggccgaggagggaggatcacctgaggtcaggagtttgagaccagcctggccaacatgatgaaatgttgtctctactgaaaatgcaaaaattagccaggtatagtggcaggaacctgtaatcccagctacaggggaggctgaggcaggagaatcgcttgaacccgggaggtgtaggttgcagtgagccgagattgcaccactgcactccagcctgggcgacagagcgagactctgtctcgaaaaaaaaaaaggtccgtgccaagctgctccctgcccttgccctttccctttccctggggtccaaaccacatgtgtcctgcctctcctggccctaccacattctggtgctgtcctcactcgcccctggcccagaggctcctgaagatgctgggcggtcctggcacagggaggagcagctctgtaaatctgtgcacatggccactcttggcctaataaaggaggtctcacagtcttctgtctgggatgtgcgctgaggattcacccagcatggcatgttctcccaaggttgaagctgggcttgaggggccacctgccttccaggacgaggaaaggcctcctggcttagagtcaggtgcccaccaggcaagggctccaggcctgctctgtccacgcagccctggctgcctctaccagcttcgtggtcctggccaccatggtcagggctgcatgcggacggcacagactactgcccatcagctcctctggccacacctgctggcctggggggtactttggtctcatttcccagatccgtattctcgttctccagggagaggatccacaggggcaggaggtgtgactgcaggctctagacaggccctgtgccgagtgctgtctgctcacctgcgcccggctcagcctgttaacagggccctgccctgctcctccgtgacgttctgccgtcatcttaccttacagatgagggaactgaggctcaacgaggtcaaagaatttggccaaagatacacagctcacccagaactttgactccaggctgtaatgctagccgtggggcctggaggtcagaagggacaggacttgtaactgatgggcctgcgggagaaaatactcctgtcagctggggtccaggaaatccaaacacacaaaattagagcccccagtaaaaacagccagcttctagcatgcgtgtaagcatttcacggactctctggcctgtatttttattcctgtttaaaaataagaaaacaggcacagagagggtcagggaactcctccggtcacacagccagcaataagctaatgtgtagtgcttggtaaggacgacggttgttctggttctacggggactcacactccctatcatggggagactgggttgtaattcatacaggaacacttggaaatgaaagcccacgttaaaaccctaaaccacggcaggtgcagtggctcacacctgtaatcccagcacttttggagggtgaggtgggcagatcacttgaggtcaggagttcgagaccagcctggccaacatggtgaaaccccatctctactgagtacaaaaattagccgggcatggtggcacatgcctgtagtcccagctactcgggaggctgagacaggagaagtgcttgagcctgggagatggaggttgcagtgagccgagattgcgccactgcactccagcctgggcaacagagcaagacctcatctcacaaaataaaataaaaccctaacccatcctgggaggggccaggccggctcaccagggctgctgcttgtgctcatgaagccgcagtaagtcgggcaggaggctgctggcacctgtcttctctatgccctcctgtccccatgtccccaaccccaggcacaggaagctgtgccctccgcccactgaacccagcactgtctcagcctcatctactttatttttttcatttttttgagacagggtctggctctgtcgcccaggctggagtgcagtggcgcgatctcggctcactgcagcctcagcctcccgagtagctgggattacaggcgtgcgcagccacgcccagctaatttttgtatttttagtagagggagtttcaccgtgttgcccaacctggtctcgaattcccgacctcaggtgattcgcccaccttggcctcccaaagtgctgggattacaagcgtgagcaccgcgcccggcccttagatcgtgacaaacgcgggcggcctgtcctagaactgtcagaaccactgtccctaaagaggcctcgggcgggcagtaagggccgcgtcactcaatgctgctcgaggggcggcggctccagggcagaggcgggcatcgacggctagatcactcgaatgacaccctgacacgaaaaggaccaactagcaacgtccgggacgcagctgaaatgctgcaggcacggtgcggggacaggccccggcgggcagaacgcggctgcgggttccgggccacatggatgggcaaggccgggcagggccgactgtcgccggctgcgcgcccgttaccccgaatcgaagcccgtcatccccgcggggcacctctccatgcccggtgcgcacggcgcgcagacacccagctctccagagacctggcccggaccccccggagcccgcccagacgccgccgctgaagcgggaaagttccggagagccgcgacgcgcaggcgccgcagccaggtcctgcccccacccctcgcgccaagagtgcgcaggcgcgcagccagctcccccgcccccgaccccgcgcgaagagtgcgcaggcgcgccgacagccgagttttctgcgcttccttctccctctctccagacgtcgtggtcgttcggtcctatgtcgcgccgggccctccggaggctgaggggggaacagcgcggccaggagcccctcgggcccggcgccttgcatttcgatctccgtgatgacgatgacgcggaagaagaagggcccaagcgggagcttggtgtccggcgtcccgggggcgcagggaaggagggcgtccgagtcaacaaccgcttcgagctggtgaggagcgcggcggcccgggtgggggtggggtggcccttgacgttgtggggcggggcgagcgtccagccgggtcggggagcggggttgtgatgccaggggtgggaagggtgacgtgggtcccagccgcagtggggagggcggggccgtgcgtcggggccagggcgacgcgggtgggcggtggcgtggggtgaagacggcgggccgcggagttagactgggttctaaccccggtgaggtgggcggggctaagggatggggcggggccgtgctgtcggggcggggcgaccgaatgggcggggttaagcggggtccgggttgtggagggtgcggggccttgatgccaagggcgtggccaacgtccgcggggccgggccacgacgtgggcgggattaaatgggcctgcggccacgtggctgtcgtggggccgtgacgctaaagggcgtggctaaagacgggggggtggcgaggcgatggcgtgggcggggttaaatgaggcctggggccaccgtgggggtggggccacggcgtaggggcaggagtcgggtggggcttccctttctcgagtctagaggggccttctctcggttccagggttgaggacttgccaggcctctgcgagcattctgctttaatcctcacaacaactctgcctaacccagggccttgctcttcgcgcatccccatcagcctaacccagcggattagtcttactctttgctgcatctccggcagctcgtttctggcacagggaagtaacagtttgactgtatggtttgctcatgcggtcctgtgacgttttctcctaagccctggcctccgtctgtaactctgcctctgcgggctctgcgatcctcccacctcagcctcctgagtatctaggactacaggtggatgtcaccacgcccggctaattttttttttttttcttttttgtagagaagagttttcgccttgttgcccaggctggtctagaacttctgcgctcaaacaatctgtccacctcagcctcacaaagtgctgggactacaggcgtgagtcaccatgcttggttgactgcccttctcgcatcaagtccacctttagtggtccccaagacccccgtcaaggttcagtaatttgctagattcacagcagttactgaaagctttttgttttgagatggaatcttgctctgttgcccaggctggagtgcattggcacaatcctagctcactgcaaccttgaactcctgggctcaaatagtcctctcaccttggcctctcagagtgttggcattagaggcatgagccactgtgcttggccccgtaagtctttttaaatttttgtcaatgtaatttgtgaaaaatgatatcacattattttattttacacttctttggtagtgaaatgcagcacctagctatgtattcgttgaccatttatatttctctttgtgacaacctgtttatatctttgcctttttatagggggtttggacagtctttttgctcgtggaagcttgctatcgattgtctctaacgtattttctcggtttgtgtttgttctttaacttctttaatttctgcgtgctgaaagatactggagccacttttctcattgttacacatccatctctctagagtgtcttcacatagatattccctgacgtgagtttttttttttttttttttttttttttgagatggagtctcgctctgtcgcccaggctggagtgcagtggcatgatctcggctcactgcaagctccgcctcctgggttcacgccattctcctgcctcagcctcccaagtagctgggaacacaggcgcccgccaccacgcctggctaattttttgtatttttagtagagatggggtttcaccatgttagccaggatggtctcgatctcctgacctcgtgatccgcctgcctcggcctcccaaagtgctgggattacaggcgtgagccactgcgcctggcttttttttttttttttttttttttttttggttacagacagggtctcacggtgttgcccaggctggttgctggtcttgaactcctgggttcaggttatcctcctgcctcagcctcctgagcagctgggactacagcataccctaccatgctcagcttgttcttttaatgctttttttttcccatttaaatatttaatctttttggtatttatatttgtgttggtgggaatttggaaaaagtgtggttcatgagttgacagagtaagagtctgtaaggtcagaaaccacacaaacccttgtggactttctggagtgagtttgagtgtcagtaacactaacagcctccatggatgaatgactgcttatcgtgctgtgttcttaggaatttcagagaattttatccagtggcacacatcagtcttaatttaagcattccatacttttttgctcttaaaactcatatttggaaataatataatcaaaatgtttattggcattctgttaaatagctcttaataaacagaagtatgggagacagtaaacagccagttacgactaaatggttatgaatgtgaatgcattggtgagagacatggtgtttctctttttaaaaaattttatttatttagagacaagatctctttatgttgcctaggttggtcttaaactcctgggctcaagagatccttccgccttggcctcccaaagtgctggaattgcagctcccagtactttgggaggtgggcagatcacctgaggtcaggagttcgagagcagcctggccaacatggtgaaaccccatctctactaagaatacaaaaattgggccaggcgtggtggcacatgcctgtattcccagcactttgggaggccgacgtgggcggatcatgaggtcaggagatccagaccatcctggctaacacggtgaaaccccgcctctactaaagaagtacaaaaaaattagccgggtgtggcggcgggagcctatagtcccagctactcaggaggctgaggcaggagaatggcgtgaacccaggaggcggagcttgcagtgagctgagatcgtgccactgcactccagcctgggcaacagagcgagactccatcttaaaaaaaaaaaaaaaaaaaaaaaattggccaggcatggtggtgggtgcctgtaatcccagctacttgggaggctgaggcaggagaattgcttgaacccaggaggtggaggttgcaatgaactgagattgtgccaccaggctccagcccgggcaatacagcgagactctgtctcaaaaaaataaataaataaataaataaataaatcgtaataataattatggatttgtctatttctactttcaaccctgtcagtttttgctgtgtgtgggtgtgtgtgtgttttggttttttggagacagagtctcgctctattgcccaggctggagttcaatgtcacaattataactcactgtaatcttgaactcctgggctcaaaccatcctcccacctcagcctcccaagtaggtggaactataagtgggtgtcaccacacctggctaattttttcaattttttttgaaagccagtgtgctgggattatagatgtgagctaccatgcctggcctagaatcttttctgaactgattggtaatgaaaatagcaacctatcaaaatttgtgggatgcaactgaaacgatgattagaactttatcatcgtaaattttaaattagaaaagtgtttaaaaatctagaaatttacctgaaacttctaccttaaactagaaaaagagcaaattaaactcaaaatgtgtcgaaggaagaaactaatcaaagaggggaatgcacagaatagagtatggacacgatggagagaatcggtgagaccgaaacttggttctctcaaaagacgagttggcaaaaactctagattgactgatggagggaaaaagggaaggtccaggtacgttaccattttcagggatgggagaggagtgttcacaggtacagatggtgcagatagtaacgggcgataaggaacttcttgctaataaattttccagattagacaaatgggcaagttcctttaaagataaaacttatctaaattgacatgtgaagaaataaaaaaatctgagcccttttatctattaaagatactgaattttttaaagtataaaacattccaggctagggttggtggctgacacctgtaatcccatcactttgggaggtcaaggcagatccatcacttgagctcaggtgtgtgagaccagcctgggcaatgtggcaaaaccccatctctacaaacaatacaaaaaaactgtccaagtatagtggcactcacctgtggtcacagctactcgggaggctgagacgggaggatggcttgaacccaggaggtcgaggctgcagtgaggtgagatgacgccaccgtactccagcctgggtgacaaagtgagaccctgtctcaaaaaaaaaaaaaagacaacctcaggctgggtgcggtggctcatgccggtaatcccagcactgtgggaggccaaggcgggtggaccacctgaggtcaggagttcgagaccagcctggccgacatggtgaaactccgtctctattaaaaatcaccattttttttttttttttttttttttaggaaaaatggacattttcctctccccctaaaaaaagataaaactccttcctggttattaactgaaatgctgatcgagctttatcctaaagaagatcagtcgtggacaagaaccttgtgaaatgttccccatttgagaccctaaaactaatgaaaatcacagcttttgggtaggtaataaggtgttttgttttgttttttgagacggagtcttgcgctgtcgcccaggctggagtgcagtggcaccatctcagctcactgcaagctctgcctcctggattcactccattgtccagcctcagcctcctgagtagctgggactacaggcgcccaccaccacgcccggcaagtttttttgtatttttagtagagacggggtttcaccgtgttagcgaggatggtcttgatctcctgacctcgccatctgcccacctctgcctcccaaagtgctgggattacaggcgtgagccaccgcgcccagccagtaataaggtttgtctgacggtgattgacagcattttagagctgatgcatggcagtagagattgcagcaaatcatgtgtcatcaccaaaacttcactgaagaagcaaaactaggcctgtcacccgtgctgtctgtgtacacagatgggcttcagagcctgtcacacgtgttgtccgtgtacacagatgggcttcggggcctgtcatacgtgctgttcgtgtacacagacgggctcctgggcctatcacccgtgctgtccgtgtacacagatgggcttcggggcctgtcacacgtgttgtccgtgtgcacagatgggcttcggggcctgtcacacgtgttgtccgtgtacacagacgggcttcagagcctgtcacacgtgctgttcgtgtacacagacgggctcctgggcctgtcacacgtgctgtccgtgtacacagatgggcttcggagcctgtcacacgtgttgtccgtgtacacagatgggcttcggggcctgtcacacgtgttgtccgtgtacacagatgggcttcggggcctgtcacacgtgttgtccgtgtgcacagatgggcttcggggcctgtcacacgtgttgtccgtgtgcacagatgggcttcggggcctgtcacacgtgttgtccgtgtgcacagatgggcttcggggcctgtcacacgtgttgtccgtgtgcacagatgggcttcggggcctgtcacacgtgttgtccgtgtgcacagatgggcttcggggcctgtcacacgtgttgtccgtgtgcacagatgggcttcggggcctgtcacacgtgttgtccgtgtgcacagatgggcttcggggcctgtcacacgtgttgtccgtgtgcacagatgggcttcggggcctgtcacacgtgttgtccgtgtgcacagatgggcttcggggcctgtcacacgtgttgtccgtgtgcacagatgggcttcggagcctgtcacacgtgttgtccgtgtacacagacaggctcctgggcctatcatgtgtgctgtctttgtaaacagtcaggctcccaggactatcacgcgtgctgtccatgtacacaggcaggctcctgagcccatcacacgtgctgtccgtgtacacagatgggcttcagagcctgtcacacgtgttgtccatgtacacagacaggctcccgggcctatcatgtgtgctgtctgtgtacacaggcaggctcctgagcccatcacgcgtgctgtccgtgtacacaggctcctttccattgaagttcagcttggcatagagctttttatgaattcgatttgtcaaacacctcaaaataagaattttttttcttaggaagtcagcatgagttaataaaagtaaattgggtgttggccgggcgcggtggctcacgcctgtaatcccagcactttgggagtctgaggcgggcagatcacctgaggtcaggagttcgagaccagcctggccaacatgatgaaaccccatctgtactaaaaatacaaaaattagcctggcatggcggcacatgcctgtagtcccagttactcgggaggctgaggcaggagaatcacttgaatccgggaggcggaggttgcagtgagccaagatcatgcgattgctctccagcctgggcaacagagcaagactccatctcaaaaaaagaaaaaaaaaaaagtaaattgggtgttgtggcgtgtgcctgtagtcccagctcctggggaggctgaggcaggaggatcccttgaccacaggaatttgaggccagcctgggcaacacagtgagaccctatctctaaaaacagacaagtaaaccagcacccagcttcactaagagacatcatcattagttgaatgttggagatggtgtagatccaatttaccagtgaccacccacaggttagaaacatttcaacaataggctttgtttcagctttcttcctttactgcagggtgcaaggcagccggcccatgcctaggccccagcttcgccagcaaaggccaggcagaaggaggcatcaccatgagaatcaccatcatggtgctgctgggatgggacaaacctcgttttggtggagtgtcagtgttttcaagttaggggctctgtttacataacacgtctatactgccatggattttctcaacgggcgtaagttgctcctgacttgtctcagcgggcgtttaagatgctcctgaatcgtatccttgtcatgtgggagcctccattggagagaaagccgactgaccggcaagcacagacctgccctgtgctttcttctcttcagcaaccgcagccggggtgtctgtcttcccaggtgcagccgagtctcaattctgtttcagaaactatctcagggctatggggcttggagctgattgtgttttctgaggtttgtggttttcaagatgttttaaattaaacaggcagttttatttatttttgaaccttagtgcatccgattggatccatcagaatctcctagttcataaagaattgttgatgctggtctctgttagctttttttttaaaaaatttagagctagagtcttgctctgttgcccacgctggagtgccgttgtgtgatcatggctcactccaggttccagattccaggactgctgggctcacgcagtcctcctcagccgcctgagtagctgggactcaagaggtgtgtgccaccacaccctgctaattttttgtagagatggggtctcactgtattgcctaggctggtttcaagctcctgggctcagatgatcctcctgcctcagcctcccaaagcgctgggattataggcatgagccaccacacccaatctgttagcctcttttttttttgttttcttgaaatggaatctcgccttatcacccaggctggagtgcagtggcataatcttggctcgctgcaacctctgcctcccggattcaagcaattctcctgcctcggcctcccgagtagctgggattacaggcacgcgccactgcacctggccgatttttttattttcagtagagacgggatttcaccatgttggtcaggctggtcttgaattgctgacctcgtgatccacccacctcggcctcccaaagtgctgggattacaggggtgcaccgccaccgtgcccggtcagcctctcactagctgaggagccagaacttttcctgttcttacccttctcccactgcctgtctcccctccaatctgtatgtgaatgtatgttgtgaggttttatccatttaatattatactcctaagattcatccatattgtgtgttcagtggtggttcattcattcattcattctcactgctataaaaaggttccagacttggcgtggtggctcacgcctgtaactccagctctttgggaggctgaggcaggaggatcgcttgaggtcaggagctcaagaccagcctgggcaatgtgttgagacccccatctctacaaaaaaatttaaaaaattagccaggcatggtagctcacgcctgtagttccagctacttgggaggctgaggcaggaggatgcttgaacccaggaggccaaggctgcagtgagccaagatcacactgctgcactgcagcctggatgacagagcgagactctgtctcaaaaagagagagagaaggtttcatcgtatgaattatttttatcgtatgtcattttgtttttctattttgagatggagtcttgctctgttgcccaggctggagggtagtggtgcgatcttgactcacagcaacctctgcctcccgggttcaaacgattataccacttcagcctcccaagtagctgggattacaggctcctgccactgtgcctggctaatttttgtgtttttagtagagacagggtttcgccatgttggccaggctggtcttgaactcctgacctcaagtgatccgcctgcatcaacctcccaaagtgctgggatcacaggcgcgagcacctcgcctggcctatcattttcattaggaaaagtttgtaggttgatgggtccttggtgcctttttttcctgcctgctgctggagaggagctgaggcttgaggagaaaggaggaagaaggaactttaatgcattggctgaatatatatatttaacgttttgtcctgcagatggtcctctgtaaatggagtaaattacaatatttgaggagtcttccttacctcatctctgaaggcagagataccccatagcctcggggccccggctttctgtagagctgctgacaaagtccccctgagccagagctgagtcactgctgtgtccaacagtctcgggttcttgcatctttcccgtccagcgtctcgcactgaccctgggggtccccaacgcaagcccgttcacatctcactattcatatctcagcatgagcgttcacactgtaagtaacgccctggctcttctccaacctgtttttccagataaacattgacgatcttgaggatgaccctgtggtgaacggggagaggtctggctgtgcgctcacagacgctgtggcaccagggaacaaaggaaggggtcagcgtggaaacacagagagcaagacggatggagatgacaccgagacagtgccctcagagcaggtggggggctgagtggtgaggaggtggcatcagacgggagagttccaaggcacccagccacgtgtatcctgtgctgtgattttccttggaggtgtaattttccgagttccattttggttacctgctagttgcccccaaatttacttgggaaccttgatgagatttgcatgaaatgagtgaaggtcgcaggcctttctcctgcatctcaggagagtctgcgcctgcccagcagtgtatgtaaccgcacacgtgtgtccctcctagccaaccgcgcacgtgtgtccctcctagccgaccgcgcacgtgtgtgcctcctagccgaccgcgcacgtgtgtccttcctaactgtgccccgaacgtttgcttggctgggttgtggatctgggtgctggtgtaagtgaactttgaagaaacatgcaggtcaggttaacgtgggatgggcagagatgcagacagcctgctgctgtgctccacagcacagaagaggggccctaaaaggagagcttgtgttcatttatccaacaagtgttcttgggagcttgctgggtgctgggaacgtgcctttgccccccaggagcctctggttgggagggcaacatacatgtgaagtgacaggtgggtcctgacttgaggctcagggtcctgggggcttcctgaggagccttcctactgtcagaaggggttggccaggtgcaggcgtaggggaccacacatacaggtgcggtgtgaggcggccagggcacagcaaggcccccgtcttcagggtggctgcagtgtggcagggagtggccgacacagggaggaatgagagctggacctggtcagggtcctgtgagcctgtgaggctggacacagaaggccctggggactgctgtagcacagcccgaggggctcggagaggtgggaaggtgcctgctggagagaagagagtgagttgaaggaacttttgggacacggagggagaggtaggggctgcttaggtgagggtggagtcacgcttgctgctttaattctcacttcttaagatttacttctcattctactgatgaaaatgtgtttctatcattagtctcatgcaagtggcaaactccggaagaagaaaaaaaaacagaaaaacaagaaaagcagcacgggagaagcatcggtacgtgagttgggcctggctgtgctctgtccctctgcctgacgcccctctccctctgcctgacgccctctccctctgcctgacgccctctccctctgtctgacgcccctctccctctgcctgacgccctctccctctgcctgacgccctctccctctgcctgacgccctctccctctgtctgacgccctctccgtctgcctgacgccctctccctctgcctgacgccctctccctctgcctgacgcccctctccctctgcctgacgccctctccctctgcctgacgccctctccctctgcctgacgccctctccctctgcctgacgctctctccattctcttctggctgttttccaaggtggtgttgaaagaagcttacttagtatttttattccttcctattaggagtataactaagagatcagggaaaaagaaaagggaaagttactttctaaatgctgcttcttgtttttacccttgttcctcgactggttggcgctctgctctgtgtctctgtgggaatgtgtgatctgatggggacatcccttctagttctggtgctcctgtgacccgtgggacacttgctgtttgccctgacatctgtcccatgcttatgggttaattgcatggtgggtacagaaccctccactggagctagtctgtcatcagaaaaaaatatgttttcatcattgcccttcgtcctcgtctgactgtgtcctgagacaagggtgtagctttgttgccgtttagttggagccacaagtcccaaccctgtttgcctgaggaggtgagcacaccagtgtgatgtggaatgcccagttttttctagggtccttctggttctgtgattctgtctatgctgagcgcttcttaggaaacatctcttcttttttctaaatgtgtggatggtacatagtgtttgacttatgctgtcctttaggaagtaaatacagtgtaataggtctcttttaagataaataattttgttattgttacaatatttaaaataatgtcagtgtggtgattaagaggttgttttggggcttttaggaaaacggactagaagatatcgatcgcatcctagagaggattgaggacagcactgggttgaaccgtcccggcccagctcccctgagctccaggaagcacgttctctacgtggagcacaggtgtggcccccgcccttctctgcggctgcccttctctgcggctgcccttctctgcggctgcccttctctgcggctgcccttctctgtggctgccacagagacttcgtgggaggaaaaggttctctaaaaaaggaaaaataaaatgtactgtctttatttaaaaatcatatgagtttattggctgggcgtggtggctcacgcctgtaatcccagcactttgggaggccaaggcaggcggatcatgaggtcaggagatcgagaccatcctggctaacatggtgaaaccccctctctactaaaaatacaaaaaattagctgggcgtggtagcgggcgccttatagtcccagctactcgggaggctgaggcaggagaatggcgtgaacccaataggtggagcttgcagtgagtcgagattgtgccactgcactccagcctgggcaacactgcgagactgtgtctcaaaaaaataataataataataatatgagtttgttattactcatttaggaaataggccgggcccggtggctcacgcctgtaatcccagcactttgggaggctgaggtgggcagatcacctgaggtcaggagtttgagaccagcctgaccaagatggagaaaccccatctctagtaaaagtacaaaattagccaggcgtggtggcgcatgcctgtaatcccagctactcagggggctgaggccagaaaattgcttgaacctgggaggcggaggttgcggtgagctgagattgtgccactgcactccagcctgggcaacgagcaaaactccgtctcaaaaaaaagaaaaaaaaaatacaaaaattagctggatgtggtggtgggtgcctgtaatcccagccactcaggaggctgaggcaggagaatcgcttgaacccgggaggcagaggttgcagtgagccgagatcgagatcgcgccactgcactccagcctgggtgatacagcgagactctgtctcccgacaaaaggaaataggaacaaggaggaaaggaagtcatccatatttcagagaacttctagttttacttcttatgtatattagagagttccttctttttcttttttttaagagacaggatctctctatcacccaggctggagttcagtggtgtgatcatagcccactgcagcctcgacctcctgggctcaggagattctcttgcctcagtctcccaaaatgctggaattacaggtgtgaaccaccacgtctggtcaaaaagttcctccttaccctgtcatccttggatgattaattcatctcttggtcttacagatgcttaatgaatcgctgtccctacttcagaaattattgccagcttaaaaaaaaaaaagctccgtggagtcagttaagacgcagtagtgtagtcccagggtgcgtgcactgccccgactcagcctcagaaacagacgtgtgccacacacagtgcctcttgacacagcactcaccgagcgccctcacggcacagtgacggcagcttccccatggtgcccgcagtggcgaggcctcagctgtggttggggtggtgattttagagaaaggcctggaagctgcctttcaaaccaaaaatccgtgttctctccttgactattaggtggctttctgaagcttttggaatcgtcttagaacataatttcatgttttttttctacaattttcaattccccagacacttgaatccagacacagaactgaaaaggtattttggtgcccgggcaatcctgggggagcaaaggtaaggtccacagtgagctgcattctcacagctgcttcattccttcttagactcttggccgggggtggtgttcctgaagctagtttacccttgagggagagtatttaaagccagagtgcacacgtaacccttagaattggggtctgaatgggagtccacagattgtctgtgtataaccttgtctgtgaccgtgggttgtagagatgctcagagtagctggtctccatccctcacactgccttgtccagcatgaggtttcaaaagccatgccgagtgcagtgctcacgcctgtaatcccagcactttgggaggctgaggcggacagatcacctgaagtcaggagtttgagaccagctgggcaacatagtgaaaccccgtctctactgaaaatacaaaaattagctgggcgtggtgggcaggcatctgtaatcccagctactcaggaagctgaggcgggacattcgcttgaacccaggaggcagaggttgcaatgagctgagatcacaccactgcactccagcctggccgacagagcgagaccgtgtctcaaaaaaaagttttcaaaagctgttaaattttaagattctagttttgtcgtggtggctcacgcctgtaatcccagcactttgggaggccaaggcgggcggatcacctgagttcacgagttcgagatcagcctgaccaacatggagaaaccccgtctctactaaaaatacaaaaaattagccaggcatggtcgtgcatgcctgtaatcccagctactcaggaggctgaggcaggagaatcgcttgaaaccggaggcagtaggttgcggtgagctgagatcgtgacgttgcactccagcctgggcaacgagagcgaaactccatctcaaaaaaaaaaaaaagattctagttttgcttctcagagcaaaactaatgtgaaggtcaggttctgagataagtttctttctctctttctttctttttttttttttttgaggcagattcttgctctgtcgcccaggctggaatgcagtggtgtgatcctggctcactgcaacctccgcctcctgggttcaggcaattctgcctcagcctcccgagtagctgggattgcaggtgcacgccaccacgcccagctaattttttttttttttttttttttttttagtagagacggggcttcaccatgtcggccaggctggtctcgaactcctgacctcaggtgatccacttgccttggcctcccaaagtgctgggattacaggcgtgagccatggcgcccggcccagataaatttcatctgtgtccattcagtagttcttagcagttgggcagccccagatgaggatggctggctgcgatggggagcacagggtctttcagctccttagaggaggaagagcagggggggtgtctgcttctgggactttatgtaggaggtatattccacctctggactctccatcgaagtgtccagaaggctttgtcttttttttatttatttatttttatttttttattttttagagacagggtcttgctgggttgtccagtctggttttgaactcgtggcctcaagtgatcctcccatctcagtctcccaaatagctgggactaccggcacatgccaccgctaatttattttattttattttttatagaaacaaggtcttactttgttgcccagggtgatgtcaaactcctggcttcaagcgattctcctccctctacctcctaaagtgctaggattacaggcatgagccaccacgcccagccagacacatcctgttttattggaccatggagagtattgctggtctataacatgccctgggtttgcacgtctgagttcttttttttttttttcgagacagaattttgctcttgttgcccaggctggagtgcaatggctcaatcttggctcaccacaacctccgcctcccgggttcaagtgattctcctgcctcagcctcctgagtagctgggattacaggcatgtgccaccatgtccagctaattttgtgtttttagtagagatggggtttctccatgttggtcaggctcgtctcgaactcccaacctcaggtgatccacccgcctcagcctcccgaagtgctgggattacaggtgtgagccaccgtgcctggtctgcacgtctgagttctaagcattgttttctttttttgaaatggagtctcgctctgtcacctaggctggagctcagtggtgcgatctcagctcactgcaacctccgcctcctgggttcaaacgattctcctgcctcagcttcccaagtagctgggattacaggcgagtgccaccatgctcggcaaatttttgtatttttggtagagacggggtttcaccatgttggccaggctggtctcgatctcctgacctcaagtgatccgccagtctcggcctcccaaagtgctgggattacagccctgagccactgcgcccggcctcccaaagtgctgggattacaggcgtgagccaccacacccagcctaagtgttgtttctgcaccatggtatacccaggtcatttcctcaccccaatggtagcatgtgtccagatgttggctacagtccccggtgtctgcaggcatttctgtgaaactgcccaagaatgagtatatatcctgcatgctgccagtgccttcagtagagttacgtggctcacactgagtgtctgcccaggtccttcaccttcttactcgtagtcgacggtagtggtttggaaacctgccgtcgtgtgtgggcagaagtgttggggttttgattgtgggtagatcaaggatgttttcatatgctgttgttcacgccttccctggatttctaacaggttttgctttatattttactttacatttttggtgttgatgggtttcttcgggaatattaattaaaaatagactttaaaatgtcactttgtcatctgcatttctctgagctgagggttccacctcgtcccaccctttgtttgcatctgcttggtctgtcttggtcatttctttatatttttgcatggttttatttctgcaaattataattattaatagtaattagtattataactgttaatactgattactcgtagtaattagttgacaataattgcctttattatttttatagtattattaaacttttttgtttatttatttctttaaaaatttaagtcctaccaaaagacttacatggagaagccacagtttcctttttattcattccttgtcctgctcctccaagacaaagacctggcctgtttccatttctccttctggtggttctctcagaagctcagaataacaggcactgctttctcttgggtccttgacttcctactacgacagcccggtcagctcatcgcccccgcacttcagcacactcctcccattgctcagggcgcctgccagccttcagagctcctccaggctcctgtcccctgccccctcctggcatctgcccaggctgcctcgttgggtctgttctggaggcttccttacttgttttgtgggatagctcaccgcaggtcaggccatccctgggattctgtacatctggcccaggagagtgctgaagggctgactctcctaggcctgggcgtgtgctacaggcaggagaagcaggctggggccaccttcatgtcaggagggcccaccacactggcctccactctgcggtggctgaactgtggggagcccggggccagggcagggatggccccgtgggaagggagctgcaccgtgctgatggtgaccgtgggcatggctgctgctgtctgtgctgccgcggctgccacgccccacctgtctggtgcctgtgtgctcaggcagagtgccctgacctctgttatttgggggtctctgccacaggggtcaggcccactctaagcactggtcagctggtatctgagctgggcaggtggggcagcatggaaaaggcatggagctgctgttacctcagagatggttggtttcttaagttgagtgatgggcatgtggatattagtacgttgttctctttcttttcgttttctttttttattttcctcttgagacagggccttgctctgtcgtccaggctggagtgctgggatcacaggtgcaggccatcacgccaggctaatttttaaaaccctttgtagaaatggggttttgctgtcttgcccaggccagtctcgaactcctgggttcaagaaattctcccatcttggcctctcaaagtgctgggattacaggtgtgagcccccgtgcccagccagaattgtttctttctctctatggggccctccctgctgcacccgtcccacagcagttgctgacgcttgtttgcatcctgtccttaatgcgtccccaccctgccccacatgccttctctgcccctcagttttgcttccacagcccgtgcagggatcaggcagccaagccttggtccccacacgccacaggaagtaaagctgtacctgtgtcccgttctccccaggccacggcagagacaacgtgtgtaccccaagtgcacatggctgaccacccctaaaagcacctggccccgctacagcaaaccaggtgagggtctgcagatgctgctggggatggagggttggggggcgttgtctgtgcactggccccggtacagcaaaccaggtgagggtctgcagaggctgctgggggtggagggcggcgggggggtgtgttctgtgcactggcctgcgctgggcaccaggggcgtcagtgcctcttgagccgagactctttgctccaggagcgctccaggagtgtgcagtgtgtgactgtttgttgccacactgagggcctgagtgctggaggcctggcccagtacctcaacacggagcctcccaggcacagtctttgtgtgactgtcttttaacgcaggttcttcctaccattctgccatcgacctttcccttatggaagcaatcgagttcattttaaactgcaatattttgtatattattgcaaactaataagtgattttaagatgaattgcaacagtgaagacaggcatggagtgttgggtgcttggttgtgtggtgtggggaagtgtcaggaggccttccacactggcctccactctgcagtggctgaactgtgggggccctcaggggccagggcaaggacagcttgtgggaagggagctgtgtggtgcccttggtgatcggcatggctgctgctgtcagcgctgccatggctcccacggccgcttctcctgcgcctgtgtctgtgggggtgccggagattgcctgcatacattctgtaaggacacatctaggagcgaggcctgtgctgtcagaaggtgaaccccgctgctcacggccccttcccttcctggcaggaacccctgctcactgcagacaggggttccatggccatgtattcctgcaggactggggccttgggcagggccatcaagaaggtatcactacaggggacctagtccatggaggtcctgggaggctgagctttccaggtttatcagaagaaactgggtcccatacacccagtcagacaagaggagccaagtgagagggtggtcacacgttacaaagctctgtggcttcagaggcctggcgctgtggccacctgtgccaccgcactccaaccctgtccttccacagccaccccggacattctcctcaatcagacgtggtctggggacagtgctcggcgtggtcagatctggcgatctgtggactgtgtgtgtccttgtccctgacattccctccaggccagtggggctagagctgtatccgagttctggaggcaaacacgtcttgataggaaactaaagcagacgggatgccgtctcctggtgtagaccagacggcgggtgttttgggaaggtgtccggagctggtgacacccatgagtacacactcaggtcaagtttgtcgatatcgcagaggcctcatccagaacaccacgaaggtgagggctgtgctcggagctgcccacgtccctgctcccggcacaccctccctgagcactctcccctcccaggtctgtccatgcggctgctggaatcaaaaaaaggcctctccttctttgcgtttgagcacagtgaggagtaccagcaggctcagcacaagttcctggtggccgtggagtctatggagccgaacaacatcgtggtgcgtggtccctgcagcccctgacaggagcaggggccatgtagccaccactgccctgggccgcctgcttccctggtggctgggggaggcatgctgcctcctgcccttcccaacaggaagggtgccagtctctgcagggcggtctggccctgtgaccagaaggagatgtgttcggaggctctaggccaagcgagctccatccatactcagaggagaggctggagcgctgctctctcagccgttcctggggaccgtcgcagtagtgccgtgtgatgcaggcccaggactctggggcttctcactgctgcccttgcctcctgcggctcagtgcaggcgagcagctcagattcccggcccccgtgcagcccccggacggcccccacacggccccggacggcccccgcgcagccccagacagccccggacctggacagtccccgtacagccccggtgcaaccctggacagccctcatgcagcccctggacagctccccttgcagccccggacggcccccgcgcagccccagacagcccccgggcggccctcacgcagccgccggacagctccccttgcaaccccggacagcctccgcagagctccccgtcatctccctgtgggaaaagcaggctgctgctttccattcctctttcttggggcttagtggggagttaggtggcccctggcctgggcatgtcaggttctgagttcttgctttaagtcatataattggttcagcttagcaataataactagcctattttgagttggggggacgttgtgagtgtcgacccggtaattcccccgtttttgtttttgtttttggagtcggaatctcactctgtcgcctaagctagagtgcattggcgcagtctcggcccgggttcaagcgattcgcctgcctcagccttccgagtaactggaattacaggcacacgccaccacacccggctaatttttgtatttttattagagaccaggttttgccacgttggccaggctggtcttgaactcctgatatcaagtgatcctcctgcctcagcctcccaaagtggtgggattacaggcgtgagccactgcgcccagcctccgctggttttaaatgtctgaaaaaaaggcatgcctgggagctggggccttgctgagtgcctttcctccagggctgtcctcccttctggtaggttctgctccagacgagcccttaccacgttgactcactcctgcagctcagcgatgcctgccgctttcaagaggatcaggagatggctcgagacctcgtaggtaaggcagagcccccaccccattcccctcagctgtgggagcacctcaagctatcaagacagatgcgatggtgtaagatgacaggggttgccaggatatccatgacagctttattgagatacaacctacgtagcacaaaacttacccatttaaagtttttgtttgttggtgtttaatatatgccacagcctcccgagtagctgggactacaggcgcccgccaccagacctggctaattttttgtatttttagtagagatggggtttcaccgtgttggccaggatggtctcgatctcctgaccttgtgatccacccacctcagcctcccaaagtgctgggattacaggcatgagccaccacgccccgccctctggcttttatttacaatgaagttttcaaggttcatcctcactgtagcgtcgatcagaacgtcgttcgtttttatggcttagtaatactccactgtgtggacggaccacatgttgtgtatccatcattagttgacggccgtgtgggctgttgtaaataatagtgcttacgtcagcatgcacacgcagtcttaggtggacacatctgtgctgcacacatggacgcctggttctgtcaggacgtggcagcagttgtgcctcatggtgttgaaagtgttaccatgtcaagctcacaagttctgtggttgaaataaatgcagcgtggcatccagggtgcccaggggcatgtctgccctctcagtgtccaggactctagtttcgtgaccttccgtccagacctttccttgttgtccattatcagaggaggggccgtggttgctgtgtgtggccatgacaccctcccctggcgtccctgtgcccacagagagagcgctgtacagcatggaatgtgcgttccaccccctgttcagtctcaccagtggggcctgccggctggattaccgcagacccgagaacaggtgagtgcagctgccctggaggtgacgcagctccccttcccttctcctgcgagtgaggctgggggaggtgcagtgggcacctcatggctgccctccagggtggaccagggcccacaggtccagagtgacccaccttcctctctctgggcttaaggatagagggatgggattgtctcagcccaggtttacctttgtctgtggacatgcctgatgctactgtggaggtcagagtgggaggtctgctgagcccaggagttcaagtccagcctgggcaccatagtgagacccccatctcttaaaaaaataaaaataaaaataaatgtttgtgttagaagtgagcctggctgggcacagtggttcacgcctgtaatcccagcactttgggaggccgaggtgggagggttgcttgagcccaggtgtcaagaccagtctgagcaccgtggcaacatgcagtctcaaaacagcattttttttttttttttttttttgagacggagtctcactctgtcacccaggccggagtgcaggggcgcgatctcggctcactgcaagctccacctcccgggttcaagccattctcctgcctcaggctcccgagtagctgggcctacaggcacgtgccacaacgcctggctaattttttgtattttctagtagagacgaggtttcactgtgttggccaggatggtctccatctcctgaccttgcgatccacccgcctcggccttccaaaatgctgggattacaggcgtgagccaccgcgcccggccactacagaacattttaaaaactagctgcgcctggtggcgcgtgcctgtggtcccagctacttgggaggttgaggcgagagtatcactcaagtgagcccaggaggtcgaggctgcagtgagctgagatggtaccagtgcactccagcctgggcagcagagtgagaccttgtctctcaaaaaaaaaaaaagaagaagaagaagaagtgagcctgagaaaccagatctccacagtgggctctgcaattgcatttccttctatgtttggctgagaaaacccatccctggcaagtttagaagctttggaaggctttgcaggtttgaccttaaatcagtgaggagctcagagtcagcctgaccctcgctcccctgtgctgagcgaccgcatgtggaggtctctcttctttcagatacttctgcccctaaagccatccctctggcatcaggcctcgctggtcagacctagactggcttccgccaggccttcccgcagcctgtcctgtgggccctttgtggagcagaccagcttctgtccgctgtcctgcctctcctgtgtgcagtgccctgtttctctggccgccctgggttgtctgcagtgtgggatccgctcctaccctctcagccctcctggcaagccaaggtccgctgacccgttctgcacagattgtctgcactgtgtgctgggtctgaatttcctccactggttttctttatgttagttttgtctcttccaatgaaattcttagttctttgaagtagattataaaatattaatatttcccgacgcgaaagagacagtgggctgttgatggaagtagcagcccaccagcatccgaaagtcacagggctccatgtatccagcctgagtgctgttagccactgttgagattggaggataaattaagatcgtaattgtaacaagagattttaactctcttcctgtaaatgataaataataaacaaaaaaacaagataaagatttcagcggggcgtggtggctcacgcttgtaatctcagcactttgggagaccgaggcaggtggatcacaagatcaggagatcgagaccacggtgaaaccccgtctctactaaaaatacaaaaaatcagctgggtgtggtggcgggtgcctgtagtctcagctacttggagaggctgaggcaggagaatggcatgaacccaggaggcggagcttgcaatgagccgagccgagatagcgccactgcactccagcctgggtgacagagcgagactccgtctcaaaaaaaaaaaaaagatttcaaagaagtttgattttcagtatgcaaattcgtgtataactctgtaaaggacaaggagagcgcacacctcctctccagacatggatctctgtgtgctgggcacgtagaaaatgccagcagaacccagagagcagaatgggggtggagcgggtgctgaccggggcgctaagcagtgtgtggggtggagcgggtgctgactggggcgctgagcagtgtgtggggtggagcaggtgttggctggggcgctgagcagtgtgtggggtggagcgggtgttgactggggcgctgagcagtgtgtggggtggaatgggtggtactggccaggacgctgagcagagggcggggtggagtgggtgctggccggggcgctgagcagagagcattctcctttgtgtcgttgtaattcatgtggaactattttggatctaggagcttctacctggccctctacaagcagatgagcttcctggagaagcgaggctgcccgcgcacggcgctggagtactgcaagctcatcctgaggtgagtgtctgctcagggccaagcccgtccacgctccctgtcctggctgcaggcccactctcagcctgacgatgcccctgttcccctttgctctgctctctgtgctgcctccggaagtctcgagccggatgaggaccccctctgcatgctgctgctcatcgaccacctggccttgcgggcccggaactacgagtacctgatccgcctcttccaggagtgggaggtgggtgcgagcctggtgaggccccgtggagggacggacacctgcttctccttctgttttcttggttcagtatctgtgcgctcaggggacgtttggggatgaaacgataatcgtctgagggcagaaccacgtcctcctgccttgtttgtctcccttgccgcctctacggagtggaatgtggttttcctagggacagtacagcagccttatgtcagaatcctcatacgtgtgtacacatgctcaaacgtgtgtacacatgcacacgtgtgcctgcaaggactgtgatgctggtaatgatgaaaaaccgacaactcccgagctcctcatgggcagttcaggaagatgcagccgggaggtagaaggagggttggttgcgtggggctgacacagggacccccagcacgtctgtcctgttccatgggaagagtgtgagtacagcaggagagacttgagctctgtccccagtaactctaacacagacacgtgttggaatgataatttcggtgtattgggttagatataacgtattaatctcacctgttttgtctttaatgcagctcccagaaaatttaaattgggccgggcatggtggctcacgcctgtaatcccagcactttgggaggccgaggcgggcggatcacctgaggtcaggagtttgataccagcctcaacatggagaaaccctgtctctactaaaaatacaaaattagctgggcgtggtggtgcatgcctgtaatcccagctactcgggaggctgaggcaggagaatcgcttgaacctgggaggtggaggttgcggtgagccgagatcgcgccattgcactccagtctgggcaaccagagtgaaactccgtctcaaaaaaaaaaaaagaaaatttaaattgacacctgggctcccattatgttcctatggggcagcacttatctggaaggacacgggctttgtaacgctaacctccagcagggcctggggctggggagaaggcgacagctcttgactttctctgcttctgtgttgaatttttttcatagcacatgttcatggataatgaaagtgggtaaattattttgaatttttaagcatttggcatagttggccaggaagtctcacccccaggaatgtggtttatagaaattcctggagctcacaaaaatgtaggtgcagggaaacctcagggagtcccccaaaatggggctgcagaagaatgttgatgatggtgtttaaggtcacaaaactgtgagtctgtgatcccattttgatagaaaaaaatgcagtgagtcacatgtctacaatatgtgacataggctgagaaaggcaagagaaactggcacggtggtagactgctcggaaactcgcgtggcgggctgctctcggaaactcgcgcggcagtgggctgctctcacagactcgcgcgggggtgggctgctctcgtctgtaaattttccacattgagagcaccaactgctcagcttcagagaggagcctgggcggcaggtgggaccctcactccccacggtgtcctcgctccggctcagtctacttctcaggccctcccacgtcctctgtatcttctgcatgcggaaagccccccaggtggacgttttaagttatctttatgctgagttaggaagaggcccttgcgttgcctgcagaatatacctgctcggggtagggctcactggtgatgtcagagcgtctgcaaactcacatattttgtctttatgacttaaggctccacgctctgtttcttcgtccctcgtaggctcatcggaacctgtcccagctccctaattttgccttctctgttccactggcgtatttcctgctgagccagcagacagacctccctgagtgtgagcagagctctgccaggcagaaggcctctctcctgatacagcaggcgctcaccatgttccctggaggtgagtgagcgctgtgtctcgcctggggtaggggtgtgtcctgtcagccgtgggggctgctcttcctggtggtggaggccaggtcccagtccttccccacacttgtagaaacatgcattctctggtagggcctgcaaacctgccctaccaaacctgaaagagggtcggctcatctcggaacccgctgcgtgccaagccaggcacgaggaggtggcaggcatcccgacccccgtggggcctgtgttctagagtgcagagacagaactggctgggaggtgcggggcattggattgtaccagtgctggggaggagagcaaagcaggggaaggtctcggcagcgccgaggtgtggccgagagggttgtgctctgcaccatgctgggatgcagaatggaggcctgtgccgcccagatggactcagcctgcacagccgtgacccctgactgcatctgggtagcttcgatccacgcacatgtggcgggcacagtgaggctgccacctggtcagacctcggggctgaccctgcctgacagcatgtgtgaaatccctctttaagatgggcctcctccgaggagctgtgaggggtgagggtgaaatccctccttaagacgagcctcctctgaggggctgtgaggggtgagggtgaaatccctccttaagacgggcctccggccgggcgcggtggctcacgcctgtaatcctagcactttgggaggccgaggtgggcggatcacgaggtcaggagatcgagaccatcctgactaacacggtgaaaccacgtctctactaaaaatacaaaaaattagccgggcgtgttggcgggcacctgtagtcccagctacttgggaggctgaggcaggagaatggcatgaacccaggaggcagagcttgcagtgagccgagatcgcgccactgcactccagcctgggcaacatagtgagactccgtctcaaaaaaaaagaaaaaaaaaaaaaagacgggcctcctccgaggggctgtgaggggtgagggtgaaatccctccttaagacgggcctcctccgaggggctgtgaggggtgagggtgaaatccctccttaagatgggcctcctccgaggggctgtgaggggtgagggtgaaatccctccttaagacgggcctccggccgggcgcggtggctcacgcctgtaatcctagcactttgggaggccgaggtgggcggatcacgaggtcaggagatcgagaccatcctgactaacacggtgaaaccacgtctctactaaaaatacaaaaaattagccgggcgtgttggccggcacctgtagtcccagctacttgggaggctgaggcaggagaatggcatgaacccaggaggcagagcttgcagtgagccgagatcgcgccactgcactccagcctgggcaacatagtgagactccgtctcaaaaaaaaagaaaaaaaaaaaaagacgggcctcctccgaggggctgtgaggggtgagggtgaaatccctccttaagacgggcctcctccgaggggcggtgaggggtgagggttatttgcgtgcagctagtatacacacattacgtgaccactcatcgcctattaggatgtcctggaagcagcatccctttctcggttctgtgggtttccagggctctgtctgggccccgaggaggcccacggcgtggggttgggcagcttctagcacaggcagaaacgtgccccccagaggggcctggccaggcctcagtctgctcgctgaccccaaaagtttcgtcccctgtgtctaagaagcacctttgtcctcctctggggctgcatgcagctggccatatgctccaccagtgcagccgtgtctggaaacgcggctgggaggccctgtcctttgtggcagagctgtgctgctgtgtcacaggctgtagcgtcagcacctcccttgaaggcaggtgggctgccaagaagccgctgccacttaccccagaacactggagatcactgcaggctctgccctcggggcccgttcccctacatggcggcctctgccctcaacctgcagtgctggctcttccactgggcacaggtggcctccgctcccaccagcctgccatggggtccagtctttgtgattaaaacatccaaccggccgggcacggtggctcacgcctgtaatcccagcactttgggaggccgaggcaggaggatcgcttgagcataggagttcgagaccagcctggtcaacacggtgaaaccctttctctaccaaaaatataaaaattagccgggtgtggtggcggacgcctgtaatcccagcactttcggaggctgaggcaggtggatcacctgaggtcaagagttcaagaccagcctggccagcatggtgaaaccctgtctctactaaacatacaaaaattaaccggggcgtggtagtgtgcgcctgtgatcccagctactcgggaggctgaggcaggagaatcgcttgagcctgggaggtggaggttgcagtgagccgagatttcgccaacgcactccagcctgagcaacagagtgagaccctgtctcagaaaaacaaaaaaaaacccaaccccatgtgtgtggagggtggtgggtgagtcttcccttggatgcaaatgggggccctggcagcctccttggggctggtgtgaaggagacccccagcctcagaccctgggcacgccagcagcagcaactcagaataccacccggaagcaagccgctggccctgcagactctccaccttagaacagctgtgtctgtgacaaggacctcgctgtgtcccttactgccttgggggctaggagtggctggggtgtgtgctgagggcccccacagagcctccgcttcccctgcagtcctcctgcccctgctcgagtcttgcagtgtgcggcccgacgccagcgtttccagtcaccgcttctttggacccaatgctgaaataaggtaaagagtggctggtggtgcccatctgtgggtgcctgtgggttcggagcctgggagccattttcactcatcctgagaggccctgagggacctgcttccagcagcaggaggggctgtggtggcggcctcggggactgtcatttgacatgggacggctctggagccctcatctgtgtggaaaagtccaggtgggacagctgagcagcctccagcttaaaaacgaggctcatataaagagggtgccaggcgtggcggcacatgcctgtaatctcagctttttgggaggccggcttgtgcctgggaggtcaaaggtacagtgagctgtgtttgtgctgctgcactccagcctgggtgatggtgagaccccgtctcaaaaaacaaaataaacaaagagggagcaaacacaggagaaagtgcacgccttggggtcatcccctggccctccagggctcgccctgtgtgcacgcagatggacccgccctgggtgcattttcacatttctgtgacgtcagtcctgcttcctaaagaacataacctgcccaacaggctcacggcacatacctgtgtgccccagccccacgccctcaggccagcagcccaggggcctcctttcactccaggccacagggcactccctggaccccccgtctgcccatccatggggctctgccagcctcgaggcaggctgtggtctgaagaggggttctgctcagagcccttgctctcccccagccagccccctgccctgagccagctggtgaacctgtaccttgggaggtcacactttctctggaaagagcccgccaccatgagctggctggaggagaacgtccacgaggttctgcaagcagtggacgccggggacccagccgtggaagcctgtgagaaccggtgagctaggggttgacacaagccctgccacgccccctcctcagggaccctcatcccagacacgggggcctcgcattcgggaggcgagaagggctgtgagcagcttggcctcccttgctgtggggcctgtgtggagcctacaagacagcgcacagcccctggcgtgtcccagaggcttcctgggaggcagctgtggtgatcagcgcagggtaccgagctgctgttcccgggtgcctcgggctggagtggtgccttcgggtcttgcagtgtttccacatgagctgtgagatgatgacgagtctctcacagcagcatcttgggagtaaagaaatctggcagagacgagaaagagtctcctgtcctgtgtgtgaacacttcggaggctcatgccctaatatgctgcaactgacaggcatccccttgctgttcttgtctcgtttgtctgcgcccttggccctgtgctagttctgtgcatcagcaccgtggctctgtgcagtggtgtggccaggctcaggaccgcctgggagtggtgcccatttgcatctccacagtgaagtctgtgtgccgcggacatgaggtgtgcccgggggtgcccaagaggcgctggtgcccccagccgctggcagtcatgggcccgtccgcgtgtctgctgtccccactggactggacattctcatggacaggagcattttgttccctgtactgctctccaagagcgatttccagcagggaccagtgcctgtgcctgtagccgtagcagtgacgatggtgacacacccaggtgtcccttcatggagatgaactcagtgacttcccacaagaagccactggctacggctctcatcgttcttgttctttggatgaagaggctgagtcactggccatgtggctgggattggtccccagaggctccccagccgcaggccagggaccagccatggtgcctctgctcgagagtaaagtgtacagtttttgcagccaccagagatgcagcgagatgcctcgtgctgggtgggggtgggggccgaggctccatggcggttaccatttcatttgctgtgctttatctgctgtgccttgtttctccccggccctaggcggaaggtgctctaccagcgtgcacccaggaatatccaccgccatgtgatcctctctgagatcaaggaagccgtcgctgccctgcccccggtaagggagaaaggctgaaatgggagctctgtgtaagccggtcacatgcacgtcccttctgctccgggcggtccacatgcaggcgtgcgtggtgcgggctccctcagcagcccagccccgccacggcaggggcagggtctagtgcagagggctcctcctttcctggcagcccgggttcggatgcttgttgttttgagagagaaatcctttggggctcagagcacaagctgagtcgtcaccgtggtgagctgctccatccgtggtcttgtgagcgcgtggtgcggctgctgggggattctctgtagtcgtggggtgtagtcctgctctgacgcctcctgtgctggaggtgccgtttctgtctcaaaacctaaggagtttgtactgttgttaagggataagatagaacgagtgagaaaaccagcaagtcagagggtcgcaggaccgtggaccgtccactggggacagcttagtgcctcctggtttaacttcagctgctctgcgggcccttatgaccggcatggctggctttgtctggggctgtgagcttctgactctcctcagtagagtggcagcacgtggcactgtgcaacccgagggcagctcagggtccctgtagcctgcatttgctgaagtgggagcttctgacacgtggtgaagatgttggcaggcttgagcggcacgtgacccccttccttccccaccacacactctggtgtgcagggcagacgccgtgcaggttcatctcgactcccgtgagtgtcctggtggcagaaggactgtcccaccctcacccaaagctcgttggtacaaaaagcacagccgtttctgtcagactctgtggctatctctcagcagatgcatccagtccatgctggagtcgacagaaggactctgctgggagaggtagaggccccctggcagcatctgtagcatcttcgttttatgtccctttctgaaggacgtgaccacgcagtctgtgatggggtttgatcctctgcctccttcggacacaatctactcctacgtcaggccagagaggtacctccctccttccagttcccacctcccagctcccacctccctcctcccagctcccggctcccacctcccagttcccacctcccagctcccacctccctcctcgcagttcccagctcccaggtccactgctccacaactacccagctacacagctacaacagctcaccaaatacacagaaaacaaactacaacaagataacaagaaaaacaaaactaagaagagatcgcaagagtccgcgaggatagacagcaatcaccagagatccacagacattaaacagacgtacaaaaacgtgccagagagagaggcgaaggctcaacaggcaaaaacagatcatcacgacaggaatcgcaaaagacaacaacagaaagagaagcaagaagaaagagaaaagaccaacaagaagaacagagggcgaaggaaggaaggaggggaggcggcggcgaggggttgcgagggggggcgaggggagggacgacggcgagagggagaacggagaaaggagacaacggcgcggcgcagagcgaggaagaagagggagggagaggagaaggagaggggagggagagagaagccacgggaagggagggggggggggagcggggggggagagggggggggagcgcgggggggagggggggaggaggggggggaggccgggggggggggggggagggggcgcgggcgtcgggggggagaggagggggagggggcgagggggtaggggagggggggggggaggggacggggggggggtaaaaaagagagactaacagaagcagcgatagagagagaacgacaaaacaggggagaggaacaggagaaacgacaaggggcaaaaagaacgaggggagagaaaaagagaggaggagagaggagacggcggtggcgagaaagacgagcgaggaaggagcaagagagcgaggaagaaaaggggaccgcgaggagagaacgggaggggaagagcaagagggaggaaggagagggaagcggagagaggggggggggcgggggcagacagacgaggaataggaaggagaggagaaagacacggggaagaggacgacagaaaagcggagagagagggacagaaagagggaacgaggggggagaagagagaggcgtgggagaggaaggacaaggaaggaggaggnnnnnnnnnnnnnnnnnnnnnnnnnnnnnnnnnnnnnnnnnnnnnnnnnnnnnnnnnnnnnnnnnnnnnnnnnnnnnnnnnnnnnnnnnnnnnnnnnnnnnnnnnnnnnnnnnnnnnnnnnnnnnnnnnnnnnnnnnnnnnnnnnnnnnnnnnnnnnnnnnnnnnnnnnnnnnnnnnnnnnnnnnnnnnnnnnnnnnnnnnnnnnnnnnnnnnnnnnnnnnnnnnnnnnnnnnnnnnnnnnnnnnnnnnnnnnnnnnnnnnnnnnnnnnnnnnnnnnnnnnnnnnnnnnnnnnnnnnnnnnnnnnnnnnnnnnnnnnnnnnnnnnnnnnnnnnnnnnnnnnnnnnnnnnnnnnnnnnnnnnnnnnnnnnnnnnnnnnnnnnnnnnnnnnnnnnnnnnnnnnnnnnnnnnnnnnnnnnnnnnnnnnnnnnnnnnnnnnnnnnnnnnnnnnnnnnnnnnnnnnnnnnnnnnnnnnnnnnnnnnnnnnnnnnnnnnnnnnnnnnnnnnnnnnnnnnnnnnnnnnnnnnnnnnnnnnnnnnnnnnnnnnnnnnnnnnnnnnnnnnnnnnnnnnnnnnnnnnnnnnnnnnnnnnnnnnnnnnnnnnnnnnnnnnnnnnnnnnnnnnnnnnnnnnnnnnnnnnnnnnnnnnnnnnnnnnnnnnnnnnnnnnnnnnnnnnnnnnnnnnnnnnnnnnnnnnnnnnnnnnnnnnnnnnnnnnnnnnnnnnnnnnnnnnnnnnnnnnnnnnnnnnnnnnnnnnnnnnnnnnnnnnnnnnnnnnnnnnnnnnnnnnnnnnnnnnnnnnnnnnnnnnnnnnnnnnnnnnnnnnnnnnnnnnnnnnnnnnnnnnnnnnnnnnnnnnnnnnnnnnnnnnnnnnnnnnnnnnnnnnnnnnnnnnnnnnnnnnnnnnnnnnnnnnnnnnnnnnnnnnnnnnnnnnnnnnnnnnnnnnnnnnnnnnnnnnnnnnnnnnnnnnnnnnnnnnnnnnnnnnnnnnnnnnnnnnnnnnnnnnnnnnnnnnnnnnnnnnnnnnnnnnnnncaccagcctggccaacatggcaaaccccgtctcaactaaaaatacaaaacttagccagctgggtgcagtgactcacgcctgtaattccagcagtttgagaggccaaggtgggcaaatcacaaggtcaagagattgagaccagcctggccaacgtgctgaaaacccgtctctactaaaatacaaaaaaattagctgggcgtggtgccgcacacctgtagtcccagctacttgggaggctgaggcaggaaaattgtttgaacccgggaggcacaggttgcagtgagtggagatcgtgccactgcactccatcctggcgacagaggaagactccgtctcaaaaaaaaaaaaaaaaaaaaaaattgggcgtggtgggttgtgcctgtagtcccagctactcaggaggctgaggcaggagaatcccttgaacccggaaggagggggttgccgtgagctgagatcacgccactgcactccagcctgggtgacagagtgactccatctcaaaaaaaaaaaaaaaaaaaatcctccagtaaggtgtttggaggaaggatggtggctgtgctgagacggagaggatgaatgtgccctcaccaggctcaggggagagggtccttgtgttccccagcagagtcacgatgtgccgaggccctgtgccaggagcagagcacacggcacattgagagaacaaaagccccatggccagaccgggagagcagggctgcggcgcaagagggccaactgccaggcggccggtgtgtctggctttcagaatccgggtcattgaaaggctttttaccttttccttctgggctggaaagtacttgccttacccaggccccgtcacccgcacagcggtcgtcgtgattatccctgccggcagggtgttgcagcattgaggaatcgcggttctttgctgcctccctccgctgtggagcccaggctttcgccctccctagagctcctgaggcctggccgctcagcgtcctgtagagccgggccggtagcccttcgcaccgtgagggtctccgcttaacgcaggccctggaagcttctgcctttgcgtaaggagtgggtgctgaaggagacgttgaaactgcagcttttctgaaaagcaaggcacctgtgcagtggccgaggatggctgtgggagcctcgctccggacgccacgcctgcctcagctgagttggtctccctcatcctgttcccgctgtccacagccccaccctaagctgatgaggaagcctcacgggccacccggggaatccagggcctgtgctcagctgctgctgctctgccccctggcggcccctccgtgtccctgcgagggaggcagctggcaggcagccccgtgagccgggttgggtcccacgagtctcagttcagtgtcgtttctgacttttcttgactttctttcaggctaagtcctatcagccatggaaacaccattgctctcttcttccggtcactgttgccaaactataccatggaggtaggttgagctcgtcccagcccctgcctccccagtgggtgcgggcatatccattccagtgcgaatgcctggagcctccttgaaccaggactgtgccagccggcacagggagcagggaaggaccaaggctgcattgtgccagtggggtgcccattctgccggggaaactggggcctgcccagatggtagcagatgcagggccgtgagtcagccggcttgatcccactctgtgcctggcttggtctagacacggcatttggttttgagagcttcctcctcacagggacctggggagggttcagggtccggtgctggggcaagggccacctcgggctccacagtgcctcctgcttgggccccgggcccctagtcccagcacagacagcccccttctcagacatgtccccttgctgcagggggagaggcccgaggaaggagtggctgggggtctgaaccgcaaccagggcctgaacaggctgatgctggctgtgcgcgacatgatggccaacttccacctcaacgacctggaggcgccgcacgaggacgacgctgagggggagggggagtgggactgagcgtccgcagaggtgaccgaaaagccgtatgatgatgttcccgatttctctgttggtcggagtcggccagttgcctgaagtagggaagctgagtgtgtcgctccctggtccactgtttctcctataaatgtaaatgggtcacgctctgccgtccgcaccttctcctttcgcaggcactgagcgccgtcccatgccctcggattcgaatcacactcagtccattctcctcccagtggcttgtgggtgaggtggggcccagaccccatgcttcctgtgctcccaggatctgggcacgggtggagaaggggccccacggggtcttcagtgcaggtccctgctgaatgccaaggccctgggtgcacgtcctccttgaacttgctgtggagttcgtcaacagagctgcgtgccttgttggtagagggtctcagggcagggctggagcagagaggcccctatgtggcagccggccttcagtcttgttcctccaagcaagtggggtggagatgttggggtcctttggctggatgccactatctgttgaatctgacaaaataattttcttttttttttttgagacaagagtctcactgtgtcgcgcaggctggagtgcagtggcgcagtctcggctcactgcaagctccgcctcccgggttcacgccattctcctgcctcagcctcccgagtagctggggctacaggcacccgccaccacgcctggctaatgtttgtatttttagtagagacggggttccaccatgttggccaggatggtctcaatctcttgacctcatgatccgcccgccttggccccccacagtgctggggttacagctgtgagccaccgcgcctggctctgccaaaataattttattagagaacttgagggcagtgcccagaattgaaggcgaagccccagaagcatgttttgcagagaagtgcccagggaagctctgagggcccatgtagcaaagatcaggggatagtcggtctgagggtgaatgggccactcggaccaagaccccagtcttgggggagggcttagctggagcaggtcctggcacagttgactgatggtgcacagaacccgtgcatcccacggccccacggtgctgcagctgcaggaggggcggaggctgcagccagacagcatcagaagccagcgtggttctggaaggatcgagaacaccaaggtgttagggctgcagcaggggtcctgtcccctggcacccctcaccgccctaatcttttacccttaggaggcagcagacacgaggggctgcccgaggctctagggcggccagtgaggcaggaaacatgttccagccccagctaggtactggtccgtggacccacctcccagaaagcccatcactgtgtaatcgtctaacctggggctcgccgaggcctgtgagttcatccttttggcagttcctggtgtctccttactctgctcagcatttcctgggcgggagcttagggtgcaggaccctccccaggacgacgagggcccagtgtccatgacaagagttggcccgagggctgagccacgtgtgcccatctcagacgtgggcctgagggtgcagccctggccctgtgctggccatttctaggagcggtgccctgaggtcccagctgtgatagccccacgctctgcaggaagagatcatgggggcggggagttggtgctgcggcctcgttcctctctgcagtgagtgaacgatgtttgtggtcagcaggagcctgtggggagcacaggctggtcctcctggtgtcccacccacccctttttccatgggggatctgcactcatctccagggaagatggttgggagataaccccagtctgccctaggtccccaccctccacagccagggtggtccgtggtgagcttcagccatcgagatgcgggagtctgctagagtcttcagggtcttttctctgaaaatgacaggctagcaaggagacctgggtcccctgcctcttccattccagatgccttgagtccacccaaataggggatgtgatgtttggagctgcagcagccgccctacggttgggagtcagagaagagccggtgttccagggacaatgcagcagaggctgagcccaggcctgctgtcctgagaggtggctggatcactgacactttggcagtggtgctggggtttatgtcatgacctgcagctgagcctacttccaatgaccgtgagatctgaaagactgttttgagggcgtagcctctgccatgattgtggggaatgctgtcctgtttcctcccttggccctgctcagcccagcgagaggctgaggcacacgtggctccccgggtgcccacaggcagcgtggctcaccagccgggcccttttccactgagccagaaccccccaaagccttcaatgcaggcaccacggtgagcccacgagaaaccctgcttgccacctcccacacccccacccccaagttcaaaggaaatggtccctgaaccaagggctgagatcagctgtgggtccagctgtcctggggagctgtactggagcccaccacggtgggactgttggtccggcggtgacccccacctccatgtctgtggccgcagctggacaggccactccctgggccacagagatgttttacctctcgcagccctcgggcacacattgagcagatgtgtgtgtgtgtgcgtgtgtgggtgggtgcgcatttgtgtgtgcctgtgtgtgtgcgcatgtggtgtgggtgcacgtgtgtgcacgtgtgtgggtaaacattgtgtgtgcgcatacgtgtgtgggtaaacatttgtatgtgcacgcgtgtgtgggtaaacgtgtgtgcgcacgtatgtatgtgtgtacatttgtatgtgtgtacatttgtatgcatgtgtgcctgtgtgtgtgtgcctgtgtgtgtgggtgcacatttgtgtgtgtgtgtgtgcctgtgtgtgtgtgtgcacgtatgtatgtgtgcacacttgtatgcatgtgtgcctgtgtgtgtgggtgcacatttgtgtgtgtgtgcctgtgtgtgtgggtgcacatttgtgtgtgtgggtgcacatttgtgtgtgtgtgcgcctgtgtgggtgcacatttgtgtgtgtgtgtgcctgtgtgtgtgcctgtgtgtgtgggtgcctgtgtgtgtggggcacatttgtgtgtgtgtgtgcctgtgtgtgggtgcacatttgtgtgtgtgcctctgtgtgtgtgcctgtgtgtgggggtgcacatttgtgtgtgcgcctgtgtgtgggggtgcacatttgtgtgtgcgcctgtgtgtgtgggtgcacatttgtgtgtgtgtgcgcctgtgtgtgtgggtgcctgtgtgtgtgtggggcacatttgtgtgtgtgtgtgtgcctgtgtgtgggtgcacatttgtgtgtgtgcctgtgtgtgtgtgcctgtgtgtgggggtgcacatttgtgtgtgtgtgtgcctgtgtgtgggggtgcacatttgtgtgtgtgtgtgcctgtgtgtgtgggtgcacatttgtgtgtgtgtgtgcctgtgtgtgtgggtgcacatttgtgtgtgtgtgcctgtgtgtgtgggtgcacatttgtgtgtgtgtgtgcctgtgtgtgtgggtgcacatttgtgtgtgtgcctgtgtgtgggtgcacatttgtgtgtgtgtgcctgtgtgtgtgtgcctgtgtgtgtgggtgcacatttgtgtgtgtgtgtgcctgtgtgtgtgggtgcacatttgtgtgtgtgtgtgtgcctgtgtgtgtgttgcaggccctggatgccagccacagagataaacgcaggaagacgtctgtcttcattctcctcgtgggtcgctggtccagaaacacctggatggaaagtgctctgcaggaacggtgcctctgcctgtggcggggaccctggtgagcggatgggccagccccacgtgtcttccggccactcagcatgcagtgtttccaggggcactaagagaccaaaatcgagatatgattagctgtaggatgtcatctaatcacagatcatcccgaggctaatttatctcccccatgaccataacacatcaaaaagttgactttttgcagctcggctgtgcctcatcttcccacgaagccccgacaggcacatccagtgaggaaccacagtgggagtcctgtggcagggtcaccccacttccgatgccctccagctgcatcttggcacgaaaaaggctgcccagttctcatgccctttcaagtcccgggctggggggtagcagtggaggctggggttaaccgccgtccgtctcaaaggcctcattgtggagctgcaaacacgaacgtccttgaaatgtgaggggacagtgctctggggcaggggctgctcactggttcatggccagaggtgagcgggctctgggtctgggtctgtgaggtgctgtggacgtcgggggtgctcctggggcagggacacagccacggccctcacaccagtggagccgtcttccttcccgaggcagaggcttggccttctcacaccttgggacccttctctcccctgtgctcatgctggaagcacagcgtgagggggcaaaggtcatgggaggcaaaaggctgggctgaggccgaggctctgtggctgtggccggacaccaggtcctgtggtggtgtgggcagggcgcgctctctcctctgagcagcctggggctgcgtgtgtgaacagaaacaggcctgccgatttgaagatggtttgaccaagtctcccaaagctgaagagaggtccctgcccatgtcccccgggtggcaatccacagacgcacctgtgtccatcagacggtatcgttgatagggagtctgaagccacccagacgtggtctgttcacgccgtggacaccacggtctgaggcagacggttacagccaccggcataggcgaatctcagccagagagagtgaactgggacaccattcacgtgatgggccagatgggctggcagcggctcgctggagccgtccgggtgggaacgctgtgtctgttggtctggtgctgcttatgtggctggttcaggtctgtcatccgtcaacctgcatatttatcactggtgcattttcatgtatgttgtacctcaattaaaacattttagggccgggcgcggtggctcacgcctgtaatcccagcactgtgggaggcggaggcgggaggatcatgaggtcaggagatcaagaccgtcctggccaacatggtgaaaccccatctctactaaaaaaaatacaaaaatttgccgggtgtggcggcacgcgcctgtagttccagctactcaggaggctgaggtatgagaattacttgaacccagtaggcagaggctaccgtgagccaagatcatgccactgcactccagcctgggtgacagtgagacttcgtctcaaaaaaaaaaaaaaaaaattaaagcagatggggtgtgggggctcatccctgtaatctcagcattttgggaggctgaggcggaccgatcacctgaggtcaggagttcaagaccagcctggtcaacatggtgaaacctcatctctacaaaaaatacaaaaaatagccaggtgtggtagtgggtgccgtagtcccagctagttgggaggctgaggcataagtattgcttgaatccagaaggtggaggttgcagtgagccaagaatgcaccactacactccagcctgcgcgacagagtgaaactgtctcaaaataaataaatacataaaattatatgtatatatatatatatatatatttttttttttttgagactgtatctctgtttcccaggctggagtgcagtggtgtgatctcggctcactgcaacctccgcctcctgggttcaagcaattctgcctcagcctcccaagtagctgggattataggcgtgcgccaccacgcctggctgatttttgtatttttagtagagatggagtttcaccatattacccaagctggtcttgaactcctgacctcatgatccgcctgcctcagcctcccaaagtgctgagattataggggtgagccactgtgcccggcaataataatttttttttttttgagacagagttttgctcttgttgcccaggctggagtgcaatggtgcaatctcggctcacggcaacctccgcctctcatgttcaagctattatcctgactcagctgggattacaggcacccaccaccacacctggctgattttggtatttttagtagagacggggtttctccatgtcggccaggctggtctcgaactcctgacctcaggtgatccacccgccttgggctcccaaagtgctgggattacagccctgagccaccatggctgacaataataaaaaattttaaagcaaaactaaagatttataaattgtaaaatgcggttgtaacaagtatttactgtaccagtaaatatgaaaaatattaatgtcctcacacacatggaggtggcttgtgagtggtgtgagcatttcatggtcagagtttggcagttgggcgagagacaggatggattttaactcgaacatcgcagacacaaaactgaaaaccctgatgcggtgcctgcaccgttgcctcctttcctgcagctgtaaatgggacgagtaattccatccccctcccgcttccacccttcagcacagacgcagtcttcagcaaggaagtgctgggaacgccctggagtgaacccaggaagatgcctgcagtgggtgccagggcccctccccaccgtccctgctgggcttcggggccacgcccgactgctgtgaacggcctgcggagcaccacgtgcgacggctggaggcgagaggtctgcctttgatgtggctgttggtgcagggcctgtggtgccttccgcagcggaaatggcgcgccgcccggggagggcgggagcagcgtcccgggtgcccctgtgaggatgagcgacgagatgactggagggtccctgaagacctcaccagggtgcccccagccggtccgctcccaggaagcgacacccccacagccccagggctgcagctgagggggtcgccactctggctgggcgaggctgggcccttgggggcaggcgccagagtggcctcaggctctacgagatgcctgaaaacaccaacctctccagggctcactagcattggacgctttcacgctctgccctggccggaagccccctcaccccgcgcgatgtgcaaactcctgcagggctcactcagtttccagaactttaattattggaaagttctccctggtccagcccccaaatctgccgtgaacgttgacagctgagttgctgctccatgcgtgctttggctgagagcagaggggacccctgtcctccctgagctgctgacgaggggaggggtgaagggtggggcctctggagagggcaggtcccggggaagctccggactcctagaggggcggccaggtgggggccctggtgaccaggacagactgtggtgttttttaacgtaaaggagatccgcggtgtgagggaccccctgggtcctgcacgccgcctggtggcaggccgggccatggtgggtgctcacgcccccggcatgtggccgccctcagtgggaggggctctgagaacgactttttaaaacgcagagaaaagctccattcttcccaggacctcagcgcagccctggcccaggaaggcaggagacagaggccaggacggtccagaggtgtcgaaatgtcctggggacctgagcagcagccaccagggaagaggcagggagggagctgaggaccaggcttggttgtgagaatccctgagcccaggcggtagatgccaggaggtgtctggactggctgggccatgcctgggctgacctgtccagccagggagagggtgtgagggcagatctgggggtgcccagatggaaggaggcaggcatgggggacacccaaggccccctggcagcaccatgaactaagcaggacacctggaggggaagaactgtggggacctggaggcctccaacgactccttcctgcttcctggacaggactatggctgtgcagggatcccagagaagacttctgggctccctcaactccacccccacagccatcccccagctggggctggctgccaaccagacaggagcccggtgcctggaggtgtccatctctgacgggctcttcctcagcctggggctggtgagcttggtggagaacgcgctggtggtggccaccatcgccaagaaccggaacctgcactcacccatgtactgcttcatctgctgcctggccttgtcggacctgctggtgagcgggagcaacgtgctggagacggccgtcatcctcctgctggaggccggtgcactggtggcccgggctgcggtgctgcagcagctggacaatgtcattgacgtgatcacctgcagctccatgctgtccagcctctgcttcctgggcgccatcgccgtggaccgctacatctccatcttctacgcactgcgctaccacagcatcgtgaccctgccgcgggcgcggcgagccgttgcggccatctgggtggccagtgtcgtcttcagcacgctcttcatcgcctactacgaccacgtggccgtcctgctgtgcctcgtggtcttcttcctggctatgctggtgctcatggccgtgctgtacgtccacatgctggcccgggcctgccagcacgcccagggcatcgcccggctccacaagaggcagcgcccggtccaccagggctttggccttaaaggcgctgtcaccctcaccatcctgctgggcattttcttcctctgctggggccccttcttcctgcatctcacactcatcgtcctctgccccgagcaccccacgtgcggctgcatcttcaagaacttcaacctctttctcgccctcatcatctgcaatgccatcatcgaccccctcatctacgccttccacagccaggagctccgcaggacgctcaaggaggtgctgacatgctcctggtgagcgcggtgcacgcggctttaagtgtgctgggcagagggaggtggtgatattgtgtggtctggttcctgtgtgaccctgggcagttccttacctccctggtccccgtttgtcaaagaggatggactaaatgatctctgaaagtgttgaagcgcggacccttctgggtccagggaggggtccctgcaaaactccaggcaggacttctcaccagcagtcgtggggaacggaggaggacatggggaggttgtggggcctcaggctccgggcaccaggggccaacctcaggctcctaaagagacattttccgcccactcctgggacactccgtctgctccaatgactgagcagcatccaccccaccccatctttgctgccagctctcaggaccgtgccctcgtcagctgggatgtgaagtctctgggtggaagtgtgtgccaagagctactcccacagcagccccaggagaaggggctttgtgaccagaaagcttcatccacagccttgcagcggctcctgcaaaaggaggtgaaatccctgcctcaggccaagggaccaggtttgcaggagcccccctagtggtatggggctgagccctcctgagggccggttctaaggctcagactgggcactggggcctcagcctgctttcctgcagcagtcgcccaagcagacagccctggcaaatgcctgactcagtgaccagtgcctgtgagcatggggccaggaaagtctggtaataaatgtgactcagcatcacccaccttagccccttccagaaagtgcttgaagtttgcgggtggagggatgggggaggggaaggtgggcaggggtgagagtcgagagggaagaaaggagtcccggaaaacgtggctgcctccccaggtgaggaagccacagccccagaggccccaaatgcctggggagtgtggaggtcccaaccaggcttgcgctgaccctgcttctcggttttctctccgtgctgacaaaccccagcctagaggaaggacgagcaggtgcagcagggccccagtcccctccactcttgacgctgtcctagctgcagaagaggcgggttcccagccttccctgtgaccacatgtgacctcagccgggacacatccctttgctggccctggccctgagtccctccagccatgatgagccgtgaatgggaccatccctgtccactctgagatgcctggaagggggctcagtgcaggtgggctgggggctgggtctgctgtctgcccagcactgccattctgggagtaggcaggtggggaaggggtcgggggtggagggtctgtgttcagccagtcctgggaaatgcttgatgtgaggcttctgaagatggcagtgaggcagaggcccagccggcggagaagtccctgggagtgagtacctggggatgaactatgctgcctggtgctggggagcagtggcgcccctgggcca

SEQ ID NO: 2204 - DNA, 2541 bp, Homo sapiens
gcgaagagtgcgcaggcgcgccgacagccgagttttctgcgcttccttctccctctctccagacgtcgtggtcgttcggtcctatgtcgcgccgggccctccggaggctgaggggggaacagcgcggccaggagcccctcgggcccggcgccttgcatttcgatctccgtgatgacgatgacgcggaagaagaagggcccaagcgggagcttggtgtccggcgtcccgggggcgcagggaaggagggcgtccgagtcaacaaccgcttcgagctgataaacattgacgatcttgaggatgaccctgtggtgaacggggagaggtctggctgtgcgctcacagacgctgtggcaccagggaacaaaggaaggggtcagcgtggaaacacagagagcaagacggatggagatgacaccgagacagtgccctcagagcagtctcatgcaagtggcaaactccggaagaagaaaaaaaaacagaaaaacaagaaaagcagcacgggagaagcatcggaaaacggactagaagatatcgatcgcatcctagagaggattgaggacagcactgggttgaaccgtcccggcccagctcccctgagctccaggaagcacgttctctacgtggagcacagacacttgaatccagacacagaactgaaaaggtattttggtgcccgggcaatcctgggggagcaaaggccacggcagagacaacgtgtgtaccccaagtgcacatggctgaccacccctaaaagcacctggccccgctacagcaaaccaggtctgtccatgcggctgctggaatcaaaaaaaggcctctccttctttgcgtttgagcacagtgaggagtaccagcaggctcagcacaagttcctggtggccgtggagtctatggagccgaacaacatcgtggttctgctccagacgagcccttaccacgttgactcactcctgcagctcagcgatgcctgccgctttcaagaggatcaggagatggctcgagacctcgtagagagagcgctgtacagcatggaatgtgcgttccaccccctgttcagtctcaccagtggggcctgccggctggattaccgcagacccgagaacaggagcttctacctggccctctacaagcagatgagcttcctggagaagcgaggctgcccgcgcacggcgctggagtactgcaagctcatcctgagtctcgagccggatgaggaccccctctgcatgctgctgctcatcgaccacctggccttgcgggcccggaactacgagtacctgatccgcctcttccaggagtgggaggctcatcggaacctgtcccagctccctaattttgccttctctgttccactggcgtatttcctgctgagccagcagacagacctccctgagtgtgagcagagctctgccaggcagaaggcctctctcctgatacagcaggcgctcaccatgttccctggagtcctcctgcccctgctcgagtcttgcagtgtgcggcccgacgccagcgtttccagtcaccgcttctttggacccaatgctgaaataagccagccccctgccctgagccagctggtgaacctgtaccttgggaggtcacactttctctggaaagagcccgccaccatgagctggctggaggagaacgtccacgaggttctgcaagcagtggacgccggggacccagccgtggaagcctgtgagaaccggcggaaggtgctctaccagcgtgcacccaggaatatccaccgccatgtgatcctctctgagatcaaggaagccgtcgctgccctgcccccggacgtgaccacgcagtctgtgatggggtttgatcctctgcctccttcggacacaatctactcctacgtcaggccagagaggctaagtcctatcagccatggaaacaccattgctctcttcttccggtcactgttgccaaactataccatggagggggagaggcccgaggaaggagtggctgggggtctgaaccgcaaccagggcctgaacaggctgatgctggctgtgcgcgacatgatggccaacttccacctcaacgacctggaggcgccgcacgaggacgacgctgagggggagggggagtgggactgagcgtccgcagaggtgaccgaaaagccgtatgatgatgttcccgatttctctgttggtcggagtcggccagttgcctgaagtagggaagctgagtgtgtcgctccctggtccactgtttctcctataaatgtaaatgggtcacgctctgccgtccgcaccttctcctttcgcaggcactgagcgccgtcccatgccctcggattcgaatcacactcagtccattctcctcccagtggcttgtgggtgaggtggggcccagaccccatgcttcctgtgctcccaggatctgggcacgggtggagaaggggccccacggggtcttcagtgcaggtccctgctgaatgccaaggccctgggtgcacgtcctccttgaacttgctgtggagttcgtcaacagagctgcgtgccttgttggtagagggtctca

SEQ ID NO: 2205 - protein, 664 aa, Homo sapiens
MSRRALRRLRGEQRGQEPLGPGALHFDLRDDDDAEEEGPKRELGVRRPGGAGKEGVRVNNRFELINIDDLEDDPVVNGERSGCALTDAVAPGNKGRGQRGNTESKTDGDDTETVPSEQSHASGKLRKKKKKQKNKKSSTGEASENGLEDIDRIRIEDSTQRPGPAPLSSRKHVLYVEHRHLNPDTELKRYFGARAILGEQRPRQRQRVYPKCTWLTTPKSTWPRYSKPGLSMRLLESKKGLSFFAFEHSEEYQQAQHKFLVAVESMEPNNIVVLLQTSPYHVDSLLQLSDACRFQEDQEMARDLVERAKMECAFHPLFSLTSGACRLDYRRPENRSFYLALYKQMSFLEKRGCPRTALEYCKLILSLEPDEDPLCMLLLIDHLALRARNYEYLIRLFQEWEAHRNLSQLPNFAFSVPLAYFLLSQQTDLPECEQSSARQKASLLIQQALTMFPGVLLPLLESCSVRPDASVSSHRFFGPNAEISQPPALSQLVNLYLGRSHFLWKEPATMSWLEENVHEVLQAVDAGDPAVEACENRRKVLYQRAPRNIHRHVILSEIKEAVAALPPDVTTQSVMGFDPLPPSDTIYSYVRPERLSPISHGNTIALFFRSLLPNYTMEGERPEEGVAGQRNQQRLMLAVRDMMANFHLNDLEAFDDAEGEGEWD

SEQ ID NO: 2206 - DNA, 731 bp, Homo sapiens
gcgaagagtgcgcaggcgcgccgacagccgagttttctgcgcttccttctccctctctccagacgtcgtggtcgttcggtcctatgtcgcgccgggccctccggaggctgaggggggaacagcgcggccaggagcccctcgggcccggcgccttgcatttcgatctccgtgatgacgatgacgcggaagaagaagggcccaagcgggagcttggtgtccggcgtcccgggggcgcagggaaggagggcgtccgagtcaacaaccgcttcgagctgataaacattgacgatcttgaggatgaccctgtggtgaacggggagaggtctggctgtgcgctcacagacgctgtggcaccagggaacaaaggaaggggtcagcgtggaaacacagagagcaagacggatggagatgacaccgagacagtgccctcagagcagtctcatgcaagtggcaaactccggaagaagaaaaaaaaacagaaaaacaagaaaagcagcacgggagaagcatcggaaaacggactagaagatatcgatcgcatcctagagaggattgaggacagcactgggttgaaccgtcccggcccagctcccctgagctccaggaagcacgttctctacgtggagcacagacacttgaatccagacacagaactgaaaaggtattttggtgcccgggcaatcctgggggagcaaagagacagggtcttgctgggttgtccagtctggttt

SEQ ID NO: 2207 - protein, 212 aa, Homo sapiens
MSRRALRRLRGEQRGQEPLGPGALHFDLRDDDDAEEEGPKRELGVRRPGGAGKEGVRVNNRFELINIDDLEDDPVVNGERSGCALTDAVAPGNKGRGQRGNTESKTDGDDTETVPSEQSHASGKLRKKKKKQKNKKSSTGEASENGLEDIDRIRIEDSTQRPGPAPLSSRKHVLYVEHRHLNPDTELKRYFGARAILGEQRDRVLLGCPVWF

SEQ ID NO: 2208 - DNA, 2544 bp, Homo sapiens
gcgaagagtgcgcaggcgcgccgacagccgagttttctgcgcttccttctccctctctccagacgtcgtggtcgttcggtcctatgtcgcgccgggccctccggaggctgaggggggaacagcgcggccaggagcccctcgggcccggcgccttgcatttcgatctccgtgatgacgatgacgcggaagaagaagggcccaagcgggagcttggtgtccggcgtcccgggggcgcagggaaggagggcgtccgagtcaacaaccgcttcgagctgataaacattgacgatcttgaggatgaccctgtggtgaacggggagaggtctggctgtgcgctcacagacgctgtggcaccagggaacaaaggaaggggtcagcgtggaaacacagagagcaagacggatggagatgacaccgagacagtgccctcagagcagtctcatgcaagtggcaaactccggaagaagaaaaaaaaacagaaaaacaagaaaagcagcacgggagaagcatcggaaaacggactagaagatatcgatcgcatcctagagaggattgaggacagcactgggttgaaccgtcccggcccagctcccctgagctccaggaagcacgttctctacgtggagcacagacacttgaatccagacacagaactgaaaaggtattttggtgcccgggcaatcctgggggagcaaaggccacggcagagacaacgtgtgtaccccaagtgcacatggctgaccacccctaaaagcacctggccccgctacagcaaaccaggtctgtccatgcggctgctggaatcaaaaaaaggcctctccttctttgcgtttgagcacagtgaggagtaccagcaggctcagcacaagttcctggtggccgtggagtctatggagccgaacaacatcgtggttctgctccagacgagcccttaccacgttgactcactcctgcagctcagcgatgcctgccgctttcaagaggatcaggagatggctcgagacctcgtagagagagcgctgtacagcatggaatgtgcgttccaccccctgttcagtctcaccagtggggcctgccggctggattaccgcagacccgagaacaggagcttctacctggccctctacaagcagatgagcttcctggagaagcgaggctgcccgcgcacggcgctggagtactgcaagctcatcctgagtctcgagccggatgaggaccccctctgcatgctgctgctcatcgaccacctggccttgcgggcccggaactacgagtacctgatccgcctcttccaggagtgggaggctcatcggaacctgtcccagctccctaattttgccttctctgttccactggcgtatttcctgctgagccagcagacagacctccctgagtgtgagcagagctctgccaggcagaaggcctctctcctgatacagcaggcgctcaccatgttccctggagtcctcctgcccctgctcgagtcttgcagtgtgcggcccgacgccagcgtttccagtcaccgcttctttggacccaatgctgaaataagccagccccctgccctgagccagctggtgaacctgtaccttgggaggtcacactttctctggaaagagcccgccaccatgagctggctggaggagaacgtccacgaggttctgcaagcagtggacgccggggacccagccgtggaagcctgtgagaaccggcggaaggtgctctaccagcgtgcacccaggaatatccaccgccatgtgatcctctctgagatcaaggaagccgtcgctgccctgcccccggacgtgaccacgcagtctgtgatggggtttgatcctctgcctccttcggacacaatctactcctacgtcaggccagagagcaggctaagtcctatcagccatggaaacaccattgctctcttcttccggtcactgttgccaaactataccatggagggggagaggcccgaggaaggagtggctgggggtctgaaccgcaaccagggcctgaacaggctgatgctggctgtgcgcgacatgatggccaacttccacctcaacgacctggaggcgccgcacgaggacgacgctgagggggagggggagtgggactgagcgtccgcagaggtgaccgaaaagccgtatgatgatgttcccgatttctctgttggtcggagtcggccagttgcctgaagtagggaagctgagtgtgtcgctccctggtccactgtttctcctataaatgtaaatgggtcacgctctgccgtccgcaccttctcctttcgcaggcactgagcgccgtcccatgccctcggattcgaatcacactcagtccattctcctcccagtggcttgtgggtgaggtggggcccagaccccatgcttcctgtgctcccaggatctgggcacgggtggagaaggggccccacggggtcttcagtgcaggtccctgctgaatgccaaggccctgggtgcacgtcctccttgaacttgctgtggagttcgtcaacagagctgcgtgccttgttggtagagggtctca

SEQ ID NO: 2209 - protein, 665 aa, Homo sapiens
MSRRALRRLRGEQRGQEPLGPGALHFDLRDDDDAEEEGPKRELGVRRPGGAGKEGVRVNNRFELINIDDLEDDPVVNGERSGCALTDAVAPGNKGRGQRGNTESKTDGDDTETVPSEQSHASGKLRKKKKKQKNKKSSTGEASENGLEDIDRIRIEDSTQRPGPAPLSSRKHVLYVEHRHLNPDTELKRYFGARAILGEQRPRQRQRVYPKCTWLTTPKSTWPRYSKPGLSMRLLESKKGLSFFAFEHSEEYQQAQHKFLVAVESMEPNNIVVLLQTSPYHVDSLLQLSDACRFQEDQEMARDLVERAKMECAFHPLFSLTSGACRLDYRRPENRSFYLALYKQMSFLEKRGCPRTALEYCKLILSLEPDEDPLCMLLLIDHLALRARNYEYLIRLFQEWEAHRNLSQLPNFAFSVPLAYFLLSQQTDLPECEQSSARQKASLLIQQALTMFPGVLLPLLESCSVRPDASVSSHRFFGPNAEISQPPALSQLVNLYLGRSHFLWKEPATMSWLEENVHEVLQAVDAGDPAVEACENRRKVLYQRAPRNIHRHVILSEIKEAVAALPPDVTTQSVMGFDPLPPSDTIYSYVRPESRLSPISHGNTIALFFRSLLPNYTMEGERPEEGVAGQRNQQRLMLAVRDMMANFHLNDLEAFDDAEGEGEWD

SEQ ID NO: 2210 - DNA, 47765 bp, Mus musculus
  misc_feature (1)...(47765): n = A, C, G or T/U
ctagtgcttgaccacagatatcctgtttggccctagtcccggtactttccagcctctctgtacttccttgttcttgtttttctgagaacatcagctctggtattttcccatgccttgcaagatggcgttactgcagttagctggctaagccttatgaaggggtctttcaagctcacaggcctgatttaaagcacattagggaattccgaggtaggttacctctatgttaatctgttgggcccatctctaccgacattccattacccaggtgtgtgggctggaaacttctgggggttgaggaggtctggaaactgacgctgacccattgtcctcgcctcaggccaggaggcaggacagcttcggaggcctggaccttcctggaatcacccagctcttagaaacagagctttaggacaagtctccttaactggcaacttgaagcctgtcatggagtcagccagccttctcaggacatggtgggtcatatctgtgattcccacatgtggggagctgaggcagcctgggttacttagtgggttacaaactagcctgggctacagagtgagcccctatctcaaaaagccaaatcaatccaaactccaaacaaaaaaacaaacaaacaaatcttacttcccagctcaaaagcgagtagtgtaccaatggacacttagtgaccattggatgctaaagttctatgtaatgatttgagtgagagagaaaggcccccaatgtgggagttcaggtacaaaaggggttaaggaaagcttccagaactacattgacaccctcaacagctcacatgtttaaatattttatcctagctagtggacatatttgggaagaagaagaaggtgtgaccttgttgggggatgtgtgtcagtggagatgagctttgacatttcaaaaggccacactgaccccaatgtcattctgtgcctacaacttgtgcatcagctgtgtgaactctcagctcttgctctagtgacacacctgcatgcctgcctctgttttcctcaccatgatggtcatggacttgccaaccctctgaaactgtaagcaagccccttaattaaatgctttcttttgtttttgttttgttttgttttttcgagacagggtttctctgtatagccttggctgtcctggaactcactttgtagaccaggctggccttgaactcagaaatcctcctgcctctgcctccaaactagtgtgctgggattaaaggcgtgcgccaccacgcccggcaaatgctttcttttgtaagttgccttataaaggtcccggtgtttcatcacagcaatagaacagtcactaagacatcctgccataggaattgataggctatttctccgacattgaaaaaggcctaatcaagccaggttagattatattaaaggcaggcttattgagaagctgatctctggcgagttcactggtcccaaggattgaggcaggggcgttgctatggagatgaggagtgcaaagggaagagaaggaaagaaagggtacagagaaaggagaaggaaaagagagatcaagagaccaaaatgtctggattgtatagggaagaacctctggggaaagggcagcccagcctttgggctggaaagttcagggttgggggcagtgtatgccaggtaggatgctggcagaacctggaggccagctctgctttggtgtgtcaaatatgcacctcagtcccttgtccccaggatacaaaaccaaacaggattctgaactggcacaacactgaaaaaaaaaattaatagtttcctagataatcaaacataagcttccgtttctgctgagcattcgtcgagagaagcagaagcacaaagactctgcacaaagacttgcacatgggcagttatagcaggtttatttgtaatagcaaacattggcaaacagcccggatgttcatctccaggtgaatggtctagctgtaccatgagcctaacagtaaagaccaaagcatcgccgtctgctgtgacgggggtgagtttcagttctgtggagtgaaagaaggtagaaaaaaatgaatccacactgcttagactcatttctgtaagactacagcaaatccaacccaaaagcaagcatcagcggctctctggaggcggggggaggataaggagggaggtgaaatgtcatgaggaagcgtgagaggatgatgggtgagtatactatctttactactgctttctcgggtctatacatatatcagcacttttcaagtatgacattgtatgttgattgtatccaatttttttttttaaagaaaaataaaagtcttcatttcaccacaatcaaagccggcctagttatggctgggccagagctccctcctttcccatctgtttttacttcatcttctgacaaatttaattctgtgggtgcaactcctggaggcctctgtataatttagcttctttctttctttctttctttctttctttctttctttctttctttcttttttttctttatcttagtcagtgttctattgttgtgaagagacaccttgctggtttgagtggaaacaaaacaaaacaaaacaaaacaaaaaaaacggctcccatagactcatagggagtaacataattggaggtgtggccttgttgaagtaggtgtggccttgttgaagtaggtgtactctattggagaaagtgtgtctttgaggatgggttttgaggtttcagatgctcaagccatgcccagatccctcttccagatgtctttggatctgaacacagaactctcagcttcttctctagcactgtatctacctgcatgctaccatggttctctccatgatggcaatggactgaacctctgaactgtaagccagcccccaattatgtgttttgctttataagagttgccatggtcgccgggtgtggtggcgctaatcccagcacttgggaggcagaggcagggtgatttctgagttcaaggccatcctggtctacagagtgagttctaggacagccagggctatacagagaaaccctgtctcaaaaaacaaaaacaaaaacaaacaaactaaacaaacaaacaaacaataaaagagttgacatggttgctgggcaatggtggtacatgcctttaatcccagcacttgggaggcagaggcaggcagatttctgagtttgaggccagcctggtctacaaagtgagttccaggacagccagggctacacagagaaatcctgtcttgaaaaaccaaaccaaaccaaaccaaacaaaacaaaaacaaacaagcaaacaaaagagttgccatggtcatggtgtctctccacagcaaatagaaaccctaactaaggcagaaatttaccaggagtacctggtacttagtaccaggagtggggtgttgctgccataggcctgaccatacttttgtttgaaggaatatggaacactttgggactttggactagaaaagtgattggacactttaggcagacctctgcaggtcatactagtagaagcatggaagacagtggtgctgaggggatttgaactgtggggaacccaaccgaacacgttttagaggagaagactattaatatgtggtctagagattgttcttgtgaaatttgggtgaagaatgtagctgctttctgcccttgtctatgaaaatctgcccaaggctagattgtacagttctaggtgaacaactttggcagaggacatttccaaacaatctaacactggctgagaggatgatggatcacagaagttccacttagactatgataaccctaaccactgggtgaaactacctccagtgccttgcctgcttccaggacctggcccaaactatggacaagcaggacactggagagttgattgccccaggttgctgataaagtaatgtcagtcctctgagttcctcctccacaggaaagcctctcagatcttctgggcctgggagactgaagacagacactactctgggacctgtgtcccttacaaagtcatcaacaccacaggagcctggtggggtgaccatctaggtacttggcaagtctttgtcattttaactgatacataggccatttggattatacttcctgttataatttatccttcttagatctctgatgccactgatggctagactaactaactttgtcaggctggtaccagcaggcaaccagctccttttcccctaaggctgcagccaccttgtcagttcgtttcatatgtacacatcaggccttgctttttctagagctattaggtctcctgttgacaaagacagacaggtttgccttgctaacaggcttccaactgatgaataaacaggttgtaggtgcaacgtagatgcaaggtttttcctgttccttcattgctttgtgcttagtaacgactggactcagtaataactcctgacgattctgatgacttgtgagatgggaagaaaaaaggattaaaatttatgcaagttctgagagtctgagaaaatgatttaactatgtaaaggcagagtggaaaggtgtaagagaataatttaaggaatatgaaaaataaaatgttttggaattattttattttattttattttaattttttattttatttttttgttttggatttcttaacccctttctatgctattgttacaataagacttcaaaaattcagagttttaacattgatcagtggaggagttctgatatgctctgtccaatctctctctctctctctctatctatctatccatccatccatccatccatccatccatccatccatccacagcttcctggacagagggaaaaagtttcatgctttttaacccaaagcgaggctcctccagctgtcttacagacacgttagctgccttttctacaatgtggattttagtacaacggtaattctaatatatctaaaacatttctctttttgtaaactaaaaaaattcgtgggagcttctggggcttgaatgagtcacaaaacatgaatccacctctcacaggcagatttctgagttcgaggccagcctggtctacagagtgagttccatgacagccagggctacacagagaaatcctgtctcagaaaaacaaaaaaataaaagaaaacaaacaaacaaacaaagcaagcaagcaagcaagcaagaaaacaagcatttaattgggggcttacttacagtttcagaagtttgtaaaagtaacttttattctcctgcataattgtcatctcccgggctcactgcctcagtctgctaacctaggcttagcctctgtacaatcttttttgtttgtttgtttgtttttgtttttcaagacagggttttctctatatagtcctggctgacctggaactcactctgtagaccaggctggcctcgaactcagaaatccgcctgcctctgcctcctgagtgctgggattaaaggcgtgtgccaccacgcccggccaggctaccttttaaaaaaatcgatttgtattatttttaactttgtgtgtgcatgtctgtgtgggtgtgtgcgtgtgaattcagtgtttactgaggccgaagctcttgatccacttgtagctggagtaataaatggttgtgagcctcctgacttgggtgctgggaacccacattgtggtccttgcaaagatcagtgctctcagttgctgagtcatctctccagcccctggatatattatttttaaaaagcgtaaactatatttgtccattcagtaggttacgttgccagttggcaaacagtctgtgttgttcgtgctgtttacctctagtgtcagagctgaggacagagagcacgagtgtggacgagtgtgtcagagcagtctcnnnnnnnnnnnnnnnnnnnnaggtgtcgacgtcgagtgtgatatagcgatgatgatcgtatgtagttcgccacgatgtagtcgtcgaatcatagaggatgtctatagttgataggtcgtcgtaatatctgatgtagagatacgatgtaattacatgacgtgagcgagtgatctagtgacgtcatatgttacatgatctaatcatagtcggatgatgctatatagtataaatgatatctgttatatagagtgtgttgagatgaaggacatatgtcatgtgtatcgtattatgagagatagagtatatcacatgtgatgtctgaatagtgtgtatcttatgtgtaatatatacatctataaatgatgtctgtctgagactgatctatatgtgagtatccgtgcacgtatgagacgtatgtgtgtgaagtgatgtagacagattagtgtctctagtcgtatacacgctactcgtatgttatgtatagagattatttagatgtagaaagtatagtgcgttggtgtatgtgtttgtagcttagatgaggattcaataatagttatgatttcaatattgtgtgtttgtgtgggttatcggttaattacaattggatgactggttatgtgtatactacgggtatcatatattaagttagttaaatgtaggtcatgacaagtggtgtcgtagatagaatggtttggttatgggtgggattatgtggtcttcaaagtgaccgtagatgttgtagaatgaggtatgttagttgtgttatgggaactgagtttgaatataaaagtttgttaagtagtagagttatattttggataggtttggtaaaagagtgcttgtcagtagtatatggtaattggctgtatgatatgatagtgggaggatgttagtagagacaagatagttatggtgagtaagtatattggatagcagatgatatgagtatgtagagtgtgttaatatcgagtatagtttggtgaagagaggagatgggataagtgatgtgtgaatgaatttgatgggaagatggtttgagtgtgaatacggaggaattctagaaatgtattgtgatgtgtagcgtgttggggggcacagaaatccgcctgcctctgcctcccaagtgctgggattaaaggcgtgtgccaccactgcccggcacctctgtacaatcttatataggcctagaatattttcagttgctgagacttactgctgaataagctcatactttcgtgttctttctgagctctggcaggctggttcaactcagctattctagctcaaactcctctccaagatgactgattcaaactggtctctctctcagcctctggctgaattggtctgcatggcctcatgctaactttggcaatttgttctgtctgctgctctgatcttcttgctccttctctggcttgttctgtcttcacctgtgtctagtttgttctcagtctgcaacctgtctctgtacaactgtctcagtaaaaccgcctcctccccccccccctctctctctctttctcttctcttctcttctcttctcttctcttctcttctcttctcttctcttctcttctcttctctttgtactgctcccttttatgttgcctcactttcctctctcttcttggaagagttgagcagatcctattctctgatctggcttcattgtttgggattaaaggtgtgtactaagggcatgtctgtactctagccagagagattaaaggtatgtgttaagagctgagccacacatcaattagaagaaaaaaatgtttctccagtaaataacacaaccttgggattcacaatgtgatcaaatatcctgcaataaaggtttagtccattttcatcatggaggggagcatggtggcatgcaggaagacatggtgctggagaaggacccaagagatctctatctggatcctcaggcagcaagaagagtgagacaccgggattggcttgggttttttgaaatcccaaaacccaccctcagtgacacacctccttccaagaaggccacactcactccaataaggccacacttctaatccttctcaagtagttccagtccttgatgactaagcatttaaatttacaagcctatgggagccgttctcattcaaaccgctacaattttcctttactttttgcttttttttttaatgggacagtgtctcctgtaatccaaagtagtcttgaactctcatgtagctaagccttgtcttgaacttccagtattcctatcactgcctttgaactgttggagttacaggctttcctgtctgtggtggtttgaatgggaatggtctcagggttcatacatttgaattttttgtacttagtgcatagaacttgttttagaaatgattgagaggtatttaccctcggggtggtttttgaggtctcaatagctcaggccaggtcctgtctgtctgtctgtctgtctatctgtctgtctccctgtctctgcctccaactgtgaatcaggatgcaagtgcttagctactactctagcaccatgcctgcctctgaaactataagcaattccccagtgaaatggtttcttttgtaaccgttgccttggtcatggtgtctcttcgcagcaaaagaacagggactaagatgccacattcttcaaatgtcattttctaagtgtgtgtcaactcatttccttttgaatcttaagtcagacgtccagcctcactatctaatctcaggccccgccttactagcctctgtgtccttcagcacacacctgatccatttgccttttctacttgtctgtctggtccttgggcaatgcagcctcctcaagtcttgtcctgatcattttctggtgatgtgcctgagcatggcatatagttgnnnnnnnnnnnnnnnnnnnnccagcctggtctacagagttccaggtacagcctgggctacacagggtataccctgtctcgaaaaaccaaaaaaaaaaaaaaaaaggaaagaaaaggaaaaaaaaaaagaaaagaaaagaaaagaaaaagtgctgttgcatcaacggagaaactgtcaagactcatagtaatgaagacaggcagacgtggctccatccttgactctctgtgaaggtgagggcccagtgctagtacagatattggctcatatcacaagcactggtataggccttctagcacagaagtaataatccaaaacacttgcctttagctcttagcctttgggatgaggaacaaagagtcagtagaaatgtcagaggagagtcatcagacagtaacgagtgcctctccgatatctctgctcacagatgaggaggaagtattaggagagacatttggctgtggttaggaaagactgtatcctaaaggctgagccagagaggcctaagtgtggacctggcctgttaggggtaaggagggtgaagtctggtgagagagctgggaggtgaagtctgaggcagacttcttccctgggatcctccaactgctgggcttgaggtgcagagggagtctgagggtgctgaggctgtcatggctgtggtgtcaccgtggggtggggaagaagggctggtcctgagtccggtggaagttagatcagacaaaggaatgtgatcaggaacgcactgaaggttggcctcaggtgggaatgatttattcactatcagacagaggtgtgttaggtgtgtggtgtgtgtatgtctctgtgtgtgtatgtggtttgatgtgcgtgtggtgtgtgtagtgttatgttgtgtgatgtgtatgtgtggtgtgtgtagtgtgtgtggtgtgtgtagtgtgtatgtagtgtgtcatgtgtgtatgaggtgtgtgtgtatgtgtatggtgtgtatagtatgtgtgtagtgtgtatagtgagtgtgtggtgtgtatgtggtatgtcgtgtgtgtgtcgtgtgtatgagtgtgtggtgtgtagtgtgtgtgtatgtggtgtgatgtgtgtgtgtggtgttattgttgttttctcagataggacctttggagcttgagacgcaccttaaatgtctcgatggtggtgtcctggggacagctgaatgtcagtgttggggatgtggggacattgaggggttaccactgtggaaccattcccttgaatgcaattactaaggcgtgggggtgggggaactcaggagaaaagactcagggcaaaggtaatggactctatggaccagaagcaggagacttggaggtgctccagcgagccagcagggcaatcggtgtcatgaacctcctggccggaggcggcagcagcgggcggaggagccggtacagtgtatcagcggcggcgaactacagtgtagccagccggtccggtacaatgtagcggcagccaggtaagccagaaagcggtctctgtaggtgtcgggggggtctggtgggaaagcaggcgagggtccagatctcagcatgcaatcgccactggtcggactccgggatcgggcttctgacccacgcactcatggtgcagaactggcagaggcctcaagcaagacgtccagctcccggctgccgcctgctggctctccgctgtgcgcaaggccttggtgacctcattggtccccgcagtacgtagggcagagcttagcgtccacagatgccgacccccacccccaatcaccgggtggcttcagagcctgagtatgggactcccggcccaaggacccgcagggactcgccttctgctatgttgagcttttctgagccttcggtttcacaactatgaaatgggtgaggaaggtcgtagagacctgccccagtggggacagtcgcatcctcagaatgaattcacgttatagcgggtagaaatgtgaggtgcgctttgttgcgccttctggggtagttgagaattattaacactggtcctgcttggcctggattgcctgtccatcctttttaagggtgtgagcaaataggatgtactttggactcctgtggcccttggactagcactttttggtggctaaagtaacacaccggaggcgggctcttattcaccataatctgtcttgaactttcacccagtgcctctgatgtaccacagacccttggtcttactctgagggtttcagttgtcaagttgtaattattattcgatttaggagagacctctgcaggggctggatggaacagttttctttttttttttttttttttttggcctttcttgagtatctttcctgaggccaaccacggattctgggtgcagatctctgtaaggctggtggggaaataggagatggggtcctactcaaagccggctgttgcttcctgcagcctgggctgggctgaggtgctgtctattcgtactcagctgaaagagcaatatggttctccaaactggttccagacaaaccaggaagatgggttaaatggctccattgcttaattcattccttgcttttgttcctggtcaggtggtggcagtgccagtcaggacatacataagggagccattttcctgggaaaggtagcccagaggagagtggagggcaagctctggtcaaggtctccctgtccctctgactatattctaaaccatcgggaggtttccagagaaggcgtctggaaggggctcctgtgggctccacccagttcctttagactgggctggtcaccacatggcgtcggtgactgcccagcagcaactcccagtttctgttgttaccaaaccacacactcgtccttccgctcagtcttgggcaagagagtagggctgcaattgatttctttctttctttcttttttaagatttatttatttattatatgtaagtacactgtagctgtcttcagacactacagaagagggcttcagatctcattatggacggttgtgagccaccatgtggttgctgggatttgaactcaggaccttcagaagaacagtcagtggtcctaaccactgagccatctctctctgtccagcccaatacattcttttttggtttttttttttttttggtttttggtttttggttttttccagacagggtttctctgtatagccctggctgtcctggaactcactctgtagaccaggctggccttgaactcagaaattccacctgccaccactgccgggcttaaaccttttttgttgttgtttttgtttttttttttttgaggcagggtttctctgtgtagccctggttgtcttggaatttactctgtagaccaggctggccttgaactcagaaatccacctgcttctgcctcccaagtgctgggattaaaggcgtgcgccaccacgcctggcggaatttttcattaatgaagattatcgttatagcaattctgataccagaccccatggagattgtcccagtggtgatagaaaagaaagcggtctgtgtgtgaatgcttaggcagaagtctgtgtttgttttttgctttttgtttaggcagaagtcttaactgcaaaggagaaatttttagagaaaaggaacaactggttttgagcagctcatgctgccaacagaaaaatgaaggcattttatggtttttgtttgtttgttttttgtttgtttgtttgttttattggttggtttttcaagacaggatttctctgtgtagcctggactgtcccggaacttgctatgtagaccaggctgtcagccttagacttgccaaggtctgagacaaggccaaggtgaagagttctgcctgcctctgccttccaagtgcttcgattaaaggtgtgtcccaccactgccttgcaagaatatagtgtttaaagaaatgtctttctcgtggttgaagaggatttttttcccatgaagatggagagaagtggcagtttgtccctggagacctcctgtcattatcctatgcctggtggcgttttcccttgcaatattggggtgggtgatgggcatgtcccatagattgctaacaagaaaggggaggacctgggcgagtgcctttatggattaggggctgagcatctgcctcttcctgtgagtgcttagccctacgtggtagtattattattgatcttttgagtgagaaactgggagcagagaaaggccaggaggccggtgttcaggctgaggctgtccatcttcttagggtgaggtgactggaatggtcttttggaatctttttttggctgcaagaggcagagctcagccttccaacagcagtggtctaaacaagtctgcttctgcctcacctgactgaaacctcgtggtgagcggccagagcggaggtggaagcgctttagatctgtcgtctggcagtcctcgtgagtggcttctgtcatagctcaaggtggctgtgtcagcttcactcgttacgcctccgttccggtcagaggaggaagggcgggagaacaggtctgagaagccctaagtgatctttctgttcgtgttccattgatcaggacatagtcacattaccatgcctaggtgcagggcagtctgggaagtcacgtgacaagagtgatgccctcctcatgcagggtgaaagggtgagtgagccctgggacagtttaatctcgcctgtactctggctgctccttaggatgcttgggaggtactggacattggtcggggacccacgactgtagcacccagggtgactcatccaaagggatcagccagggcccctgcatctccttagacccttagcagctgttggtgcttagtagactggagctatggccttctccctgaatggaggcagggccagcaggacatggtccgtgtggctctggagagagcttttgccgagcgctgaggggccgtcagtccaggataccaccccacgtggtgaggattgagcaggacttgcctctctgggcttagtgcttttatttctcttcaagtgaaagagcagggaaagattgagttcatcttgtttctgactgatgtaggcacggagaaagcacactacgtccccaggcacccacggccccgctctacactcacctctgacttcccatcgtcatagcaaaccttgtatagatgtttgttttcaagacagggtttgctctgtagaccaggctatcctctaactcagagatctgcctgcttctgccttcccagtgctgggattaaatgcatgcaatgccacacctggcatgtacagatgttattttgtgctcagggtctatgaataatttcacccacagtgacccacctctggatgagggagcagaggcggagagaagctatggaatgtggcttgactagataagtggagaactgcattccaactgctcctggttcattcagacacagacagcccctcccttctgccaggagccaccagattttgtgttcccattgtgggctgagccctagggaggggacagagtgtctggtgatcttaacttctgacaagtgcggacctgaacacttctgctacacgcaatcccatggcagggacagctcaggccatgtggtcgtgacgtaggacaggaactgaagcttgagaggtaccatctcctactagaacccagttgcattgttggggcccggggaggggcctaggtcaccctgccaatagcaggccaaggatgggccttggatttaactccagagaattccctggtaaacactggttaacgaggatggtattttttgggtgttttgttgtagggaacatctcaagtaaggggacaggaaggaagatccagttccaagaggtgtgtctcataggagacagctagaagcaagggcctgactagactggagccaagtgagaaatctgccctcttgaggcctagcacagagccggctgaagagttccaagaccaagtgaaacccctccaggagtaggacctaggattccagactttctgtcagacacccttggataagcctgtacccctgggctagcccttatcactggggagttctgaggaaatgccaccaggggagcatggttagaggtagctgtgttggctttagggggagggtaaggattgaggctgctttgtggggttgccctgctatatctaccccatgtccccagccttggggaagtgaaggagccagggtgttgttggagaaaggggatgagccatgacgagcctgggacactcatctcagccgtgctgggccctgcaggtgggatgctatggaatatgatgagaagctggttcggttccggcaggcccacctcaaccccttcaacaagcagcttggtccgaggcatcatgaacaggaacccagtgagaaggtcacttctgaaggtgagctttggtgcagggtgacaccctgctgtgtagattgacaacttagatcaaccctgtcactcttcctgcttgtagcccttccagtgggtggtcatagtcacattccacctgctctgaggttttctttgtcttccttttttttttttttaatttgtttttgggttttttgtttttttttttttgtatttgttttttttttttcaagacagggtttctcggtatagccctggctgtcctggaactcagcttgtagaccaggctggccttgaactcagaaatccccctgcctctgactcctaaatgctgggattaaaggtgtgtgccaccaccaccctgccttcttttgtcttccttatcagaatgaacctaaaagaacgggagttatcaacctgtgggtctcaaccctttgggggtttgtgtaaccctttcacaggggttgcctaaaaccatcagcaaattcagatatttatattatttataacagtagaattgcagttatgaagtagcagtgaaagtaactttacggttgaggatagacgtctacacagcaggggaagctgcatcaagggttgcagcacaggaagggagagtctctggtctacagggcaggggtctgattctggggaaacactgttgagtcccagggccacccaaggttggcatttagtgaactcttggagcaaactcagagccgagatttaaggagaagagtctaatggctgcagtatctgtgggtagaccctcaccttcttgagaccagaaaggtaggagggcagggggttctgggtagggaagttggggagttcttgggaccagtgtagttgttggggtgacctgaagtctatgcaggacttaatgaagctgtgatgtagccagtcagtggtttttcttgggactagtcagaaatgatctgccttagaaattgggtttgtttctttgtttctttatttagagactggctgggtccatctatgtagccaagggcctctgtctctgcttcctagctgctaggtttacaggcaagtgtggccacgcccagtttgggatggttctataatactatcttgtagaccactctgagtaccactcagtgttcacaaatttttttttttttttttttttgtaagcaatgcacacaagagtcagacattttacagggggatcagaaactggaataaacacttgcagttttgactagtgctttctggtcttcacagtgacacgggcagctgagtggctatagcttttcccagtaccccctttttgtgggcttcccgatactcctggctcaattctatcctccccagctgcttccctaggtgatgagtggaaagatgtagcaggcagactctttaccacccttcatgcctgtcctcttactccagacactttgcctgagctgcccgctggggagcctgaattccactactcggagcgcatgatggatctcggcctgtctgaggaccacttttcccgccctgtggtaaggtttgagtctgggcttttaggtgttaccctcattaacgagacttgcaggtggctcattgttcagatcctctcacaagttggggtacagtttccttactagctagtcactaccactgggatcaggggcccccaagtcaacccagggtcacctgggtttggaatctgaaacattgatggcaccttcatcttcaaaatctgaggtctggagacagttggaaggcacgcatcttcttttctcctaagtttcaggttgttttgttttgttttgttttgttttgttggagacagggtttctctgtgtagccctggctgtcctggaactcactctgtagaccagactggctttgaactctgaaatccacctgcctctgcctcccgagtgctgggaataaaggcgtgcgcaaccactacccggcaagtttcaggttcttaaggagtgagtgtggccgggtagtgaagatgcatgccttcaatcctagcacttggaggcagaggcaggtggatctcttgagtttgaggctaatctggtctacagattgagttctagtgcaaccaggttccatagagaaaccctatcttgaaaaaaaaaaaaaaaaaaaacaagaaacagaaaagaaacagatgttagagttgattccctttggagtccccaagggtgttttataaatggcactttacatacacacctgtttggcttcgtctgtattttgttcaacagatttgttttgaggagaaaagagaaaggagagacctagtatgtttggaaagccctttagttttatgcacggcatctctaccttatttgagagaaacagtgactcttctcttcctcttcctcttcctcttcctcttcctcttcctcttcctcttcctcttcccctcccctcccctccgatgccggatccccattttttattttgtgactcggactggctttaaactccttaacatcccgtaaccctcacacgaattgccacaccccgtaaccctgaaactcacccttctgacactcgaggtcatctattacataacatattgtagaacagaacgcactgatcgttcacacaggtgtgacagcagctccccacagcactcacacatccctagtcaaatgtgtaatcgttctgacgtaactcgtgcatgcgccatatacacacgcacccatctggtaaacgaccccgcccagacacacaacacacagagccagacagccacccagagagaactagacacatacacactgactgcgagccacagacttggtcacagacaccagctcacccatccacaatcgatctgagacagacgtcagatctacactcacacggacacatgagctacagatctcacttatactaacgttacgaaacatacagcctattccacccttcactagtcggactccagacacgacataagagtgatagcaggagagtaccgtcgccccttgcacaagacatcaccacacaccagacgtcacgttactactcttactacaccagactagcatcacgatcactcgccaccactccgcaacgacgactacacgacgacgtcgacttcacaatgtactagagtacgtcgactctaccacgcctactacatctacgacccgatcgctgacatcgacacgcagcaagatcgttcatcacgtggtacatcgagtagtacgactaccggaccgacgagcaccatcatcaccacgcgatgaaacctggtagtactagcatgagcagcaattctacgaagtacgtagtgtaagtattagaaccacccaaggtgcgaaatnnnnnnnnnnnnnnnnnnnncaaaatcaataataaaataataataaaataaataaaaaaaataataaataaaaaaaaaaataattataaaaaaaaaatataaaaaaaactatacaaaataacaaaaaaaaaaaaaaaaaatacataaaaaaaaaaaaaacataaaaaacaaaaaaaaaaaaataaaaataaaaaaaaaaaataaaaaaactaaaaaataaaaatcaataaaaaaaaaattaaaaaaaaaaacaaaatataaaatataaataaaaaaaaaaaaaatataaacaacaaaataaaaaacaaaaaatttaaaatacaaaaacacaaatttaaataaaacatataataaaaaaaacaataaaaaaaaaaaaaaataaaaaactaaaaaacaatacaaaacaaaacataatataaacaaaaactaaaaaataaaaccatataaaaataatatatatataatcaaaaaaatttatttaatatataaaaaaaaaataacaaacactaaaatatattcacaaaccatacaatttatataaacaccataaaaacataacattataaaaacaaaaaatattaaattaataatcctcaactactaccactacctaatcctcttcctcaacagatttacataaaactcccctcccctcccctcccctcccctccgttcttgtcccttctcttcagacagagtttctctgtgtagctctggccatcctggaactcaatctgtagaccaggctagcctcaaattcagaagtctgtcagcctctgcttcctgagtactgggattgaaggtcacaccttgaatcctttaaaggcagtgacccaagccttcagaagtttctaaggccagctttaaacttgctctgtagcctaagctggtcttgatttttttaattctcctgtctcagcctctcaagcagttggattccacgcccatgccgtcgagcccaaggtgttttatgtttcttataacatgtcacacttccacttagccgcaaaaatgagctccagagaggaaggacagacagcactacctttctgcctgagtctttagaaatctatctcatggaaggaggagggtgtctcctgaggacagagtcagctgacttccctggctttcaggtctgaatggaaaaggagcagtctaggcgtggggccttagctagactgagcctttgggtcggcatatgagagagcacccagaggtgctgagtctggggtgactgcagcattcggctgctctgctggctcctcagccgttaagccagaagcctcttcctcatcttctcagcctttttagagatgaaaaagcttggctaagaaagctgttgggtttggatttctaaagaggaagtgtgtttgtgcttgtaatgctggggcttctggtgtgttagataagcattctacttacctaactgcttacctaagtgatacacccagccttagaagtcacccctcaagacagagtccctctgtatagccctggctgtcctggaactcactctgtagaccaggctggcctcgaactcagacctgcctccttctgagtctcccagcactgcctccaggtgctggaattaaaggtgtgtgccatcagacctggtattttttttttacaattttcttaaatgtgtgtttgatgtatgagtctgtacatgatctcatgtgtgtatgacacatatgtgcagaggccagctgtcaatgtcaggaggccctctctattgctatctactctatctatctatccatccatccattcatctatcatctgtttacataactatctatctgtccacccatccatccacctaccatctgtttatataactatccttctatcttactacctgtcaatcatctgtctaaatatctgcctgtcatctgtcagtcatcatctatcatctgtctgtcggtctgtctgtcagtctgtctgcctgcctgccatctctctgagataggatttcactatgtagccctgactcactatatagaccaggctggccttggactcacagagatcctcttgcctctgcctcacttgctccatcttatttacttggagacagagtctctcactgaccctggagctcattcagccagaacagctggcccagaactggagggatcaccgcatttcccttcccaagcaccgggattacagacatgttctgccgtgctcccatgctccgcgtttgctccgtgtgctggggaattcctcctcagatcctcatatgtccatggcaaggacttcacttacggagccatctctctctagctcctgttttgtctttaagataatcttaagaagcccaggttaaagccggccgtggtggcgcatgcctttaatcccagcactagggaagcagaggcaggcggatttctgagttcgaggccagcctggtctacagagtgagttccaggacagccagggctatacagagaaaccctgtctcaaaaaaccaaaaaaaaaaaaaaccaaaaaataataataataagaagtccaggttagtctcaaacttgctatgcagctgagggtaaactcttttttccccttcctctttttgagacaggtctatagcctactctctcctccagtttaacctctgaccttcctgcctccacctcctgagtgcctgaattatagacctgcatcgtcaagtgtggcttatttggactgaacccaggatgtcggttatgcttggcacgttctttatcaacagagccacatccccagctgtagaagctgtttgtgaaacatagcctgaattcagtgttcagaggcccgtgggcagatcagtccagctaggagcagggagcatggatggagtctttttgtttgtttgagacagggtttctctgtgtagccctggctgtcctagaactcactctgtagaccaggctggcctcaaactccgagatccatatgtcactcatgttcttctgtgttactaactctcctgggccttgagtaagtcctcctttgggtgagggagctaaggtctgctatattactcatggggacaggcctaccttccatggggagaaacttttaagtggtcatctgactgctgccttccaacccgggcagggtctcttcctggcctctgatgtccagcagctgcggcaggccatcgaagaatgcaaacaggtgatcctggagctgcccgagcagtcagagaagcagaaggacgctgtggtgcggctgatccacctccggctgaagctccaggagctgaaggtgggttcagacctctgacctgcccgcggcgccgcatggaggcaggggacagggagctgtccttctgtggtctttgagaggctcaggtagggacagaaaagcagagtgaaagttaggctagctacttccctgacagtacagccccccttgattgtgagggacagaaacccaatcttagggcccttaaaggcaaaagaagaaaccattgttttgttaaccatttggggttgggggtaggggcttctaatgatgtcaggaatcctgtatttttttattttaatattatatatacataagtacactgtacctgtcttcagacacaccagaagaggacatcagatcccattataagatggttgtgagccaccatgtggttgctggaattgaactcagaagagcagtcagtgctcttaacctctgagccatctctccagtgtcctccccgccccactctgccaccctcaatcctgaattcgtcttcacggctttctgttagtcagccttcgggcaggcacacagaggtggcaaaggtgaagtcagcaactgatagctgtcaggtcaatcgtgattggccaggcctggctcacaagcttagggacattcacagtgattggctagtcctggattacatgtttgtctctgagaccatcacagtcgtgggttagttttgtgactacccactgaagcaagtgtgttgacataattcctctctttgagatgcacggcctaggagggcaatcacctgaaggtgtcaatgggaggggacagtgtttcatagatccaaaacccacacaaggctaggatgcaggtcgggcctgtgtctctctacggactctgagcctcagggcgtttatagtggaacattcattaggaaatgggtaagaaaaatacatagtggagatacatagtagagaacatattccaagatacagtagtttaaggacacacatgtaattttccttatgagagaaaagcgtgtagttgatctaggtgacggccagaagtgttaggaccctaggtcatcttttgttcctctgcggatcctgaagggagtccaaggtcaccctcctgtggcaagcagaaggcagaggcaacctccatcctgcttacaggtcccttggatctatacagtgcctggatgctaagaggctggaaaaagttgtctgtgtgcctaagggctggtgattcactacaattctgttgctaatgagagcaggggaagtgagcctcaaagtctctgtgacaggcaggtcctggcaggcgtgtgctgaggatcctgggaaggagctgctgcttacctcacctatgacttttccattgctcttccctgacaggaccccaatgaggaggaacccaacatccgggttctcctggaacatcgcttctacaaggagaagagcaagagcgttaaacagacctgcgataagtgcaacaccatcatctgggggctcatccagacctggtacacctgcacaggtgggcaattccgagacccgctcctatataagccctgctcccagccacgggttgcgtgtaggtgagttatgtagtgtgtactgatgactgagcatcaccgcgtgtcggagagaagaggagcagaggtgaccacacctgttttaccggccctgcatctagatctgagctgtttagtgtagtggtgatgagacacggaagggtttttaaaatttacatccacgggagtcgaataggtagtttagtttcattatctactttacaaacactgaaaagccacaagaagctggcagctaccgtatcggatagtgcagagaggatattgcaggatgatggtagtgttctgtatgagaagccaggttaggagatgacatggtatgttgggcggtgctgataaaggaaaatagaagggggatgatagggtacagtaggcccttggaggtcagggcacaagctaggagtatatgtaaagaggaaggatgtggtatggaggaattgtatgtgcaaaggccctgtggttgataagtgtctactgcctttgaggagcagcaccaagtctaagggtagatgtagaagaggtacactcagaggtgaccaagggcatctctctatgtgcagtgaggaccatgcgtgctggattcttagactctggttgctaaatcgagctaaaggaagaggggggttgtctctgatgaaggtttaggtaggaagtaggtggggtcagtgttggctgcagaaacaagtgaggagtcaggatgacttctgaggtagtctcagtcctagacagatggagttctggaaacctgagatgggaaataggaaaagacagagagaggttaggagaggaaatatccagagacatgaggttctttgggactctgagtcacagagcagttctgggagaaagtcctgagttaatatggacattacagggaagccaatggtgtgtgtgtgtgtgtgtgtgtgtgtagcagtccaggtgaaggtcctcttaggtcgtggtgatctgtacaacttttgagagagctgggtatttcctactgcagggtgttgttaccgctgtcacagcaagtgcctgaacctcatctccaaaccatgtgtcagctccaaggtcagtcaccaggctgagtatgagctgaacatctgccctgagaccgggctggacagccaggactaccgctgtgcggagtgccgtgctcccatctctctgagtgagtgaaagatgatggtcctcttccgtgctgggcaagaacacagtgcagaacggagccaggaaggctcctggtgggtgtgagaaagctctctacggcagctacataagggcctgggcccagcgcaggccatgcaccttgtttctggggtgtgacaaaggaatgttacaagattctttcaattcttatagaaacaggccatctctggctgtttgatgacttgtctaggtctctccagggctggtctctgatctctgactacagtgccttcgtgttaccactatcaaggaaagctcacagagacagggactaggggaaaacaaggaagctggacaacaatcacgtacttcttttttttttaaatagtttatttttatgtatgtgagtacactgttggctctcttcagatatgtcagaagagggcactggatcccattacagatggttgtgggccaccatgtggttgctgggaattgaactcaggacctctgggagggcagtcggtgctcttaaccgccgagccatctctccagccctccacaatcacactctagagatggaaattgtaattactattaatttaggggatcccttcagaggttctttctgtcttactattttgttgtctcactttgctggtgagtagacagggtgttaagacactagggtgacgtagggcctcattgggagaacccctagcacagcttgctctccgccacagccttggtgaggggagatccatacgatgtgagtccttggctagggaaggcagaccttaatcaatcccaaatggctaccctgaccttgtaaccacctggtccccacaggaggtgtgcctagtgaggcccggcagtgtgactacacgggccaatactactgcagccactgccactggaacgacctggctgtcatccccgcgagagtggtgcacaactgggactttgagccacgcaaggttgggttttggagatacggtggttggtggtggtgggggcagtgggggcttggaggtgaggggggcagggagaagatgggcgtgaccagtcctagctctgcaagctggtcactcagctacctgccctgcaggtgtcccgttgcagcatgcgctacctggcactgatggtgtctcggccagtgctccggctccgggagattaaccctttgctgtttaactacgtggaagagctggtggagatccgggtgaggctgggggcctggttagggtccggatggatcagtctccctgtgggaggtgtacttctttctcttaggtatctggtgggtcaacagtgttaaaccagagacagtgttaagttccctaataatctcattgaaaaagtggggtgatgcctcatcccttgatgagcattagggagctaacataggagggtcgccagttcaaggtcagcctaagcttcatagtcagagcttgtgtgtgtgtgtgtgtgtgtgtgtgagagagagagagagagagagagagagagagagagagagagtattaattttaattctttccatcaatcaactatttacctacctacctacctacctaacttacctgcatggttgggaatgtaactctgttgttaggatgctagcttgtttgttgtagagtatagcttgttagaatgctagcctagatgcagggaacatgggttcaactcccagcagtctgtgaatctggcatgagaacacacatagctcaggccgaccttgaatttgatagctagctgaggttagtcttaaattcctgatcttcctgcctctacctcctgagtgtaagattaaagcaaatatgtgctatataaaagtatgcacctatataatagtctattttctttagctcagtagaaccaatgtgttatttttattattattttgttcttttgttttgtttttcaagacagggtttctctgtgtagccctggctgttctggaactcactctgtagaccaggctggccttgaactcagagatctgcctgcctctgcctccctcgtgctgtgactaaaggtgtgcaccaccacctctgggctgaaccaaaatattataatatacagtcaacgtacagggttgtcaagatattttactctttttgtattctctgtgagttttggattgtagagtgtactctatacttagagccattcaagtgacgtctgggcacttcagcagctccacatgactgttggccactcacagcggaagagtcagggccaatgtcagatcaagctgtagttcagggacgagctgatgatgtcatgaacaaggtgggaaggtcttagagtacatgttttagtggaagagtctgaggtggtgcagggtgagtggtcaaggccaaggcattggtgagagatggtatcgacctaggatttttgcccactgcattggatatgacttagtgctgtcctgaggtggtaggatgagctcattgcttacttgtgggactgggccaacaagaatgggagatttcaagagcccaagtttaatgaacctaagttcctatgtagattcaatgctgacgtgtacttgaggttggatagactggccaaatgtaggaccatccagtggaatttgagggcaccttccccagtccctcctgaccttacaatcaccccagcatataaggaaggggaagccaccctgtgagtatgttcactatgaagccagtacagtacagaagcagccccttagccttacagaacgagctgcagtgccaccagtgtgccatggctgatatacccacctattgtctgagtccacagaaactgcgccaggacatcctgctcatgaagccatacttcatcacctgcaaggaggccatggaggcgcgactactgctgcaggtcagactgctagagggaccagtccggggtgtacttcatactcagattcctcagataaccctgtagttcgtcgatacattgttacttctagccgcagtttgagcgcagtcttctgggagtgtcacatctgtaataaactgcccaatgttctacccaacagcagtgttctctgaggatcttagttttccaaactgagataaacaattacagtgtttggcctcagggaggtaggtggtctagaccttagcctcctcaggcaggcagatggaacaatatgcaagttttttgtttgtctttttgagacaaagtttttttgtgtagcactgaatgtcctggaactcaccgatcaggctggcagcaaactcagagatctgcctgcctctgcgtcccacactctaggattaaaactatgcaccgctgtgcctaaccaaatacaagttttttgtttgtttgtttgtttgttttcgagacagggtttctctgtgtagccctggctgtcctggaactcactctgtagaccaggctggccttggacttagaaatccgcctgcctctgcctcccgagtgctgggattaagactcacctactgctttgctcaataagtgacctaagacagtagtctaaattatgggaacagtgaacaaaacaggcccttagagagtagccagtgggtcaggaaagcaagggaaatggacagtctgtcatggcgtggctgctgtgtacagaagcaagcagggcaaggggtgtgaagaacccgaaggttttaaatagaccaggaccaggaagaggctcggatgacaggggaaagttctggggaagggttgggagcactgagcagccactgtggctcgaggagcattacaggcatgtgaaatgaggtgcaggggagtatagattaggaaatggtgccctggccatatcttccctctggcttctccagaatctcaaggtccctaaatggatcccctatgtaacttgtggtttctaccagaaccctgggcccgacaacaggagtggccgtgggtggcgagtgggggaccttgccgtgcatttgtggtaactaacacctgctgggtcttggcagctccaagacagacagcattttgtggagaacgatgagatgtactctatccaggacctcttggaagtgcacatgggccgcctcagctgctcgctcactgagatccacacgctcttcgccaagcacatcaagttggactgtgaggtgggtctccctcgcccctctgcagtgatggctctggctagaggagactctaagctgttctagccaccagggctgagggccaggattggccagtgaatgaatgcctggcctgagctggcacttccttgccagtcactaccctgattcccttttcaacagcggtgccaagccaaggggttcgtctgtgaactctgcaaagaaggggacgtgctcttcccgttcgacagccacacgtctgtgtgcaatgactgttcggctgtcttccacaggtgggtgaggcctgtagctcactctcggctaggtgtggaggcccctccccactttctaagcagaatgccttcccttgtcctcggctgcagctggtctggtggaacctggcactgctgccctgagagaggagacagacattgggctttcgctgtctttctttcaaagtcctttgctggagttaggccctggtgtctatgtctaaactaaaagttctattaaggggtggggaatgtagtctaatatacatgaaatcttgtgtttgatttcaagcacagaatagaggtaggtctagtggtaaaaaacctgtaatctttatttattttgggcataagtcataacttactatttttattatttatttgcttatttatctactatgtatatatcatacagctttctgcctatatgtatgcctgcaggccagaagagggcatcagatctcattacagatgggttgtcagccaccatgtggttgctgggaattaaactcaggacctctggaagagcagtcagtgctcttaacctctgagccacctctccagccctatattattattattattattattattattaaatctttttttaagtctagttgttatccctctctcagtcctctgacagttcctcatcccattctaccccctttcctcctcccacctccaagaggatgcccccacccgcccaccccaccccgacccctgtaatcttagcatgtgagatgcaggagcagcaggctcgaagttcagtcatcctaagctacatagcaagtttgatgccaccttgggctacttgagaccctctcttaaggaaaaacaagttccattaggaatgagtacctacctgcgctgggccactgcagcctaacttatcccagagcagcctctgaagccctcctggccccgagctgcccacaggccccactcactgcttagctctatatctacattcaagttactctttctggcccagtataggccaggtgggcccaaaccttactacctacccttcatgctcaaatagaaaaaaaaaattaaaatcaaagtataaggagtttgcagagccatgctacactttgacacactgtagaaacaagggaagaaagcttcatagtattgttaagttatggttgtggctgaataagagagctagagggctgacaagatggctcagcgggtaaaggagcttgcagctaagcccagttactcgagttccatccctgcaatccacatggtagagagagaaccacctcttgcaagttgttcctgttttttataggtgtgtcacggcatatgtatgccttggcatgtgcaggtacacacatacacacttgacaagagcttgggtatgagtgctggcggccccgctcgttaggagaagccagcagctgcgtaccaggctttgtggaaaatcctgcagatgccgattctgtttctgtcctgtggcagcagcgagcctctctgaacttgtaggaggatactgagaactggcctagggagggaagtcttctgggcagaccccagcctgtctttctaacctcagggactgttactacgacaactcgaccacgtgccccaagtgtgcccggctcacattgaggaagcagtcactattccaggaacctggcctagacatggatgcctagaacactggagaacgccaggcaccgtatccacccctccggctggtgcctgctggccttgcccaccagatgtgcattctactctggagacgacccccccccccccagtatatcctccagacctcttcgtctcgggccagaaggaagtgactagtggccaccgggactcattcctcaggtgcttgtggagacttcgagtgtgtatacctggctgttgattgggtgtgctgctatcggggggtcaaaatactgcctgtgccccattgtaggactccttaggcagaggagcctgggtgtgactctccaggaaggtgggggagtcgctctcttatggcacagagccctccaggcctttaaaaccagtccttctgcaccatagagatggccttgctcctgtctagtacacccttacaactggtcagaaacttgagaggccagtccagtaagaccagaggatgcctcctgactgagttttatctctgctgaggaagatttaggttctactcagaggcacccaacccttttagcaccttgtctcctgagggacgtccggttttctctgactggggctgttcactactgtgtcccgtggatcttcccctgcatcctgagagttgtcatcgtcatccttaatctgtcagtcacgtgtgcttccccacccccctttgtacaatagggagggaaggggtctgtggaacttctcttggcagatacgcctgcttctgccacagcctagtccactttatcctggtgctctgagccgggcagctaggaacccaccctaaagaggcttagcatccagttccataggtgggactgtgtccggggaggaggttctaggtcaggtgagcctgtcagttatcattggcctcggtggcattcgggggatgaagcttttccacagaggtcactgtcctgctgacgcagtgcactgcttgaagatgaccagtcgctgggtgttaacgtaggagcctgaggtcaagagctaggaatatttgctagacccccagcaggaggcccacggcccatacaggaaggtctaagttttgaaggtgggtggggcctacacctttccacctccatgcacacaccccataaatcctacgatggaagatgtgtggagacgaggggaatctcacaataatgtggctcctgtctttcttcctgggaggcaggagttggttgtgtctgcccctttgctccttgtctgtgaattgctgttgacacacacaactagtgggcaaaggccagggcatgtcacaacctggatttccttcacctttaatgaggcacaagaagggacttctcaactggccagttgaagcttagcttactggcgtgtttgggggaaggacggacacactgccacctcctcctcactgctctttgccatcaggtggctttactcatgctgtttttctgtttcagttttcccatctggaaagcattggggagggggagttgacctgcctcagggtgaaagatcaggagtcctttgagtgtgatgtgggtcaacaatgggtccctgttccgcttcctctttggcgttaaagagggtcttaaaaccaaatgccatttcccatacccccaaatctgtgtgtttcctgccattgtatcacatgtctgtcctgagtccttggcccttcttgagcctcctgtgtaatcaacatcacgtttccaactataaatcatagtgtctaaaggaaatgttactagtctgccatttgttgggcaaagtcttgggccttctctgagagcacactccaaacctccttcctccatacttcacttccaccattgccttcaggatgatgcagatctggtagaaacatgctatgagtccacgggtgggtatgaagagtctagccagcaaccgaagcccatttggatggctgacactttctggaagagtatacccaatggtatccatcatggaaccaggctgccagcggggaggcctggtcacaacaattgccactgtgatcttggtctcattaattacgggatatctaggttggtgtgtggtgaatctgggataaagcagagttaaaatcacatacaagccaatgacaagtttaggaaatcatcctagacttccatagttcttgggtttgagtatgatatttgagtgaaaataatagttagggactcattgagagaaacatttaggttggtgtcagacaaggcccaagcctgtcctgacactgagtcatttcccaacgaagaccagtttggtcttcaattgggtgagatgggctgcccacacatgtaccttgggggcttaggttccaggaattatttcacttgtacttggcatggaaagaacgttgtgtgataggagtcatgtttctctggcttccttaactgtcttatttacttaaatatgagatcctccagttgtgtaaccatggcggattcagctagagttctactttaactcctggggacatcattcctctttataaggcagatgcaaggaaagtgccgttactgcagttcaaggctttaactgtgcactgaggcctttaactgaggcttatccgttgcccttgtgcactggcctcagaggagctataaacactcttccagtgtgtcccagcatggtggtccaccccggatgtcccaacacttgacaagcagagtcagaggtcagcttgggacacatggtgggataatgccttaggatttctcccaagtaaggcactgtcaaacaattccagtcttgatgggctactgtgctgtactctctgctggagagaagcctaaggaccaagagaaatgcctttccctctgttggcacactacacagcacagaagaccctgggctgagatgcgtgtgtctccgggcacggttggcggctgtagtctgcactctgtccacattgatctagaagtggacggctcccttgctttccaagctcagtgcttgttttcttccaatgcttttactttaaagtagacaaaactgcctatttgtccattttctggattccctaatgttaacatttgtcctgctgactttattctctctctctctctctctctctctctctctctctctnnnnnnnnnnnnnnnnnnnnctcgtgctgtgactaaaggtgtgcaccaccacctctgggctgaaccaaaatattataatatacagtcaacgtacagggttgtcaagatattttactccttttgtattctctgtgagttttggattgtagagtgtactctatacttagagccattcaagtgacgtctgggcacttcagcagctccacatgactgttggccactcacagcggaagagtcagggccaatgtcagatcaagctgtagttcagggacgagctgatgatgtcatgaacaaggtggaaaggtcttagagtccatgttttagtggaagagtctgaggtggtgcagggtgagtggtcaaggccaaggcattggtgagagatatggtatcgacctaggatttttgcccactgcattggatatgacttagtgctgtcctgaggtggtaggatgggctcattgcttacttgtggaactgggccaacaagaatgggagatttcaagagcccaagtttaatgaacctaagttcctatgtagattcaatgctgacgtgtacttgaggttggatagacgaccaaatgtaggaccatccagtggaatttgagggcaccttccccagtccctcctgaccttactatcaccccagcatataaggaaggggaagccaccctgtgagtgtggccgctatgaagccagtacagtacagaagcagcccgttagccttacagaacgagctgcagtgccaccagtgtgccatggctgatatacccacctattgtctgagtccacagaaactgcgccaggacatcctgctcatgaagccatacttcatcacctgcaaggaggccatggaggcgcgactactgctgcaggtcagactgctagagggaccagtcctgggtgtacttcatgctcagattcctcagataaccctgtagttcgtcgatacattgttacttctagctgcagtttgagccctgtcttctgggagtgtcacatctgtaataaactgcccaatgttctacccaacagcagtgttctctgaggatcttagttttccaaactgagataaacaattacagtgtttggcctcagggaggtaggtggtctagaccttagcctcctcaggcaggcagatnnnnnnnnnnnnnnnnnnnnctggtaccctcttctagcctgcatgatccatgcagccagtacactgtatacataataaataaataaataaataaataaataaataaataaataaatcttttaaaaaaagaatactatgtgtctttttgttgtatcagacttgaagagactctgggactattgaaatatccactttctgctgtactgtctgccagttctagcatccactgataatttttgcttaactcaagtataactgtgaaatggcgattcattctgtctgcatttatgagttgatgttttagtacaaaatttttctaatgttccttcctggtttctcctgctgactcatgctgagactaaggcctggctgtctctgctaggtaatgcaagggaggagtaggggagagagggagaaaggggtcagggagagaagaaagtctgagagagagaaggggagaaggggcagagagagcgaagacgtggggggggggcgggtatgggagtaggggtcggggttgggagggaacagacccttttatagcaagccaggcctacctagctgttgctaggtaaccgttgggcggagcatagaaggactgctaacactatgggtgacaatggtcttctcccgggcatctgtacctttgaaatgtagtcaaggcagcctaatgatatccttgtagaatctgagtacacgcagatgccacgcgtgtcgtggacagccccactgtccagaaactggttcatcctgaacacccacacctccctagtgccgagtccaaattgctagtccgcacaactgcaggcaaatcaaaactggggtgactctatataccaaccaagtgctctcctgcagagcaatgccacaggccctcacgctgctccagaccgtcccgtcgctccctgcgcatccgcaggaataaaaatgttgttaagtaaaattaaacaagggtctatgacgtggatcaatgagacaagtcgtgcaccaaataacagttcctttgttcacgataggcacatctagtctggatgtaaaataccgggagcacctccaaccggtagtgctggtaccctcaaccagggagaagtggcctcaaaatttaattacgtgagccgcgttaccccgaggacccacccaagccattgatgtcgttgacaatgcaaaatttaaaatacgtctaaaggcccttggtgtactaggtcaagttggccgcggannnnnnnnnnnnnnnnnnnntactgcccagcaaatgcatacttcttttcatggccttaattaaaccatcagaggaaactaatattgacattaagatcttattcacagagctgggtgtagtggttcatgcctttaataccagctcccaggaggtataggtaggtggatctctgtgaatttgaggccagcttggtttgcatagtgagttccaggacagccagggatatactgaaagaccctgcaatcaaacaaacaaacaaaaaccaagaatatctagtcattcacagatgcagctcaactggtaaagagctcacttagcatgcctgagacacggttttgacctctagcctgcataaatggggcatggtagcacatgactgtaatccaacactccctgcagatagaggcagtaagatcatgaattcaaagtcacctttggctacatagagagtctgtgggcagcttagaatgaatgagaccctgttaaaatccaaacaaacaaaatccaaccaaagctgcctttgctcctgtaagactccttgttaatgttcagctgccaaggctcttcaggctttaaagcaaatcattgacctacttgaacaatgtaggtgtgtgtatgtgtttgagggtctgtgtggaaccacggcatttgcacatgccagggaagtattttgccaccaagctaaaacctcatccctatttgtgatgaatatctccagtttgggtttgtctcctgttaggttccagctttggatattggaaaggaaccacacagttgtgatgtgtgttctcagtgtgacctgaaggtatactggtggtatggcccattgctgaagaccttgtgtggtgctttgaatgagaccctatagtataggcacagacctttgaatggttcataagttgatgcaactgtttgggaaggatcagtaggtgtggccctgctggcagaggcatgtcattgggagtgggctttgaggtttaagaagcccaggacaggttcagtttttccctttctgcctcctgcctggggatcagaataatacctcttggctactgctccagagccatgcctgcctgcctccccactccctgccgtgatgatcaggtctcaccctctgaaactgtaagcaatcccccaattaaatgccttggtcttggaattttatcccagcaatagtatggtaagtaagacacctaaggtggcatctatactttttcattgtttttaaaaaatatttattactttattttatgtatatgagtagtacactatagctgtcttaaggcacaccagaagagggcatccggtcccattacagatggttgtgagccaccatgtggttgctgggatttgaactcaggacctctggaagagcagtcagtgctcttaaacagtgagccatctctccagcccttgtttgtttgtttgtttttactttttcattgctgtaccacttgatagaacaactttggccaggtgtggtggtgcatgtctttaatgtcaacacgtgggaggcagaggcaggcagatctctgaattcaaggctagcctggtgtatataatgagttccaggagacccaaggctccatagtgagatggtaccttgggggtgtgtgtgtggggaaataagaacttaaaaggcaagatttatttaggctcaggctttcaacagatttgaccagtagtccttgactctactgattctggacctgtggtggggaaagcattacaaaggtggaagcagtggagaacactttatctcatggtaaagagccggcaaaggactgggaccatggaataccttcagaagcatgacctcaggaagctacctcctcctgctgggctccagctcctaagctttccaccactttgaaaggcagcctccctacctgagggctgaacacacgaacttttgggtacatttcatattcaaacatagcaggtgtgtttgggggtttctccactaaggttactattcaggggctggagagatggctcagaggttaagagcactgtccagagttcaatttctagcacccacccacatggtggctcacaaccatctgtaatgagatctggtaccctcttctagcctgcatgatacatgcagccagtacactgtatacataataaataaataaataaatctctaaaaaagaatactatgtgtctttttgttgtatcagacttgaagagactctgggactattgaaatatccactttctgctgtactgtctgccagttctagcatccactgataatttttgcttaactcaagtataactgtgaaatggcgattcattctgtctgcatttatgagttgatgttttagtacaaaatttttctaatgttccttcctggtttctcctgctgactcatgctgagactaaggcctggctgtctctgctaggtaatgcaaccgctgctgactcgtgtttgctatcccaactctaccaaactagactgctggtgcatctgtaaagggtttaggagtaaatggagctgcactgttaacctgtgaactaaactgccaatttctagacaacacaggagttgctcccaagaaccatttctaaacaggtccacttcccccatatcctttcttttccactacctctagtggatggtgagctacaaaaagaggttaaagctttttaaaaaccatcattaagccaggcaatggtggcacacgcctttaatcccagcactcgggaggcagaggcaggtggacttctgagtttgaggccagcctggtctacagagtgagttccaagacagccagggctacatatagaaaaaacaaaaagaataagaaaaagaattcaaatcaacaacaatcattaaaaataaactttttaaacattaaagttacagggatacctttcttaaaattgttgagcaggttctgagtttgtgatcactgacaaaatgaacatgcctaagtaacagaacttccttggtttaaaaatattataaatgtaagaaaagagaaaatcatgaaactagatagatagttcatattgtatttgatattcatattgtatttgatattgtgttctgacttgggcttcagtgagctgctgccaagcctcctgacctttgtcctctgaccaccattgtatgccaaggcccagctgcggaaataaataatgtgagttctaaaatatcagatatttgggttctagttttactgtttcatctttgaaaacagttgctcacaagcgcgtaagtatggctgagagcagcggtatgagtaagtcatgactgtgaagccagggcatttgtttcctggaaggtttcatccatacattagaagggaactgggttggctcgacagctcagcaggtaagggttctttctgccaagcctgacatctgaatcccataccccagaatggtaggagagaaatgactcccacaagttctccagcctccaaactcatccacacaaaaaggaagacagaataaaaacaaataaaaaaaatggcaggtaacatgttcaggtcaactgaaaatggagttgtaaatatgacaaatactgtcttcccagaaatctcaaatctgttttcaaattcctctatcaaattgtaaagcaaggctacacaattttgttcttccctggactgtgtttagccagtgtctggaaacccactaaacagtgtgtcttaacttgacttgctattatttcatgtagagtgcatatcatttcatattataattggaaacactatatcaataaattggatttcataatgaagatacatgtttaactcatttgaatgaatagttagatccactaaaatattaacactgtatgtcagggatttttgttttcttttgtttttgtttttgacgatatgatttctctgtatagccctagctatcctggaacacactctacaccaaccaggctggcttcaaactcaagagatccaaaagactctgcctgctgagtgctggtattaaaggtgtgtgccaccactgctcagcttggggggtggggggaggaatgccatttttttattgtcaagttcttgctcaatttatgtttttttaaaattaatttatttattatatgtaagtacactgtagttgtctacagacaccccagaagagggcatcagatctcattacggatggttgtgagccaccatgtggttgctgggatttgaacccatgactttcagaagagcagttggtgctcttaaccattgaggcatctttctagtccaatccacttattttaaagacagggtctcattgtacaggcctgcctgtccagaactttctccacgtcagagattcacttgcctttgctgggattaaaggtgtgcatcatgcaccacccttactctcctgcctctctcttgcctctctcttgcccctttgctccccctctccccattcccttccctcctctctccatgtggccatggccagcctcaacttctctctgcctttctcttcctctactaccctcttaactcccctccccatgccctaaataaactctattctatatatatatattgcatcaccatacttggcaagttgtctagtgcccacagacatcagaagagggcatcaggtcccatggaactgtggtttcagatgtttcaaatccaggtcgttggctagagttcttaactctccagctctcatgaattctgtttttgataccacgaacaacttgagaacaatgacaagaatcataaaatctcttcaacatttggtcttgacaaagtcattttactctgaaagggacatgatatcaccataggcagaataaacagtgaaggaattcctggagctgccagcatagccctggatggcttggaatctgcttgtgtagaccaggctgttatcaaatcacaaagatccatttgtttctgactcatgagcactgggattaaaggtgttcaccaccgtacccactcatctcattttggggggaccagttctctcattgggatggagcctactgggtaggctgggctggttggctattggtccctaggatctgcctagttacacttcctcacggctggcataacaagtgagtgtcacaactgcctttaagaaactgtgtacgggtgttttgcttgcacatatgtatgtgcaccacacatgtgcctgatacccttggagaccagaaggcattagatttcgtggacctggagttacagaaggttgtaaaccaccatgtgggcgcttggaactgaggagcaatggctcttttaagttattttctttatatatgagtacactgtcactcccttcagacacaccagaaaagggcatcagatcccattacaggtggctgtgagccaccatgtggttgctgggatttgaacttaggacctctggaagtgcagctggtgctcttaacctctgagccatctctccagcccaagcatgtgctcttattgctgagctctctctctagtcctgcctccccgaccggaaatgagttctgggtattaaattctagaccttatgtttgcatagcaagcattttaccaactgagctatccctccaacttttaatacatgttaatgccaacaatatgatacttacacagtggttctcagccttcctaatgctgcaactctttaatacagttcttcatgttgtgatggcccctcaaccataaaattattttgttgctatttcataattgtaatttttctgttatgaacggtaaatgtctgataagcaacctctgtgacagggtcatttaactcacaaaggggttggaagctataggtttgctcttaggtaacaaaatggaagctgctgcagcagcaaggtttccaggatgttaacacctggagatggagggtcttaactgcctctcacctactgtagtcacttttgttttggctttacctcaaagttcggttacacactgacaacaccctaagatggttgctttgaacagctgcctttcctctcacagctcctagaacagcttgttccattgattgttgttagaactttgaatttttgttcctcattagggctgctgtgggtaaggagctgtaagctactttgttaaaaggctactactatacaggtacggcacagttacaatgtaactgaagtgtcctattgtccatcccccatttgatacattactatctctgcctatctctatataatgataaggcagagacccttggtttcattttttccttgagtattagctaaaagtttatacaaaataaacctacctacctttctttctttttctttctttcctctctctctctctctctctctctctctctctctctctctctctctctctcttttccttccttcctttaaaaaaaagtcttcttctaacagctgttctgtggcaagcacatacggttgaaaaattgcctctcttctccttgtcactgttagaacctagtggggaaacccccactcaactcccgattcagcgtgcacacaaaaaaatcactaaggaccatctcttattcccctcttcttctactaagtaattctcatcttagaattttagaagtctatatctctatgtggagaatactgcatttactctatttttaacatgggaataaaaacagaataagaaagattagtaaacagaactaggcagggacccttttagtgaggcttgagggtctgggcatgatgtaggtgcacgtagatcagatctctggctggaaccggtgagatgtctttggggtacccggcccattcactgtagccagttgtgaccagacttatttctgcaccacctgaaagccttttagtttagcatacagatcattattataacaacataggtttaagcacatcatttaagacagtgatgggcatgggagccccataaaggatcttaaaagagtaaaactgaatcaagagggagtatttctagttttaaatagggcaaggggaaggagcaccaagtctgtgccagtctctatgattaattttgtcaaggtctgtttagagttctatttgttttttctatctgtcctgagctctgaggtctgtacacataatgcaattttcatttgacctctaaatacttggccacaccctgacttacctgggcaacaaaggcagagccattatctgacattattgcttttggcactccgaaccttggaaaaattttttttactaatcttcttgatgactatctgagcagtctcatttttacagggaaaagtttctatctatcttgaggatgttcacaaaaactagaaggtattcatacacatatttttctcagtaaagtctatttcccagtagatatcaggtctgtcttcccatgggaggactagttttctttcttcagtttctactattttatacagttttttttcaccagtcttaatttgtctataacttgatagtcttcagacggtcaggatcattgctctttgggatgcttgtttggcggttagatctgccatctgatttcttttagccacagcatcttaggtctttctctgcagatgtcaacagctctctttgtctgtatattgctccatacagtggcaaaagcatacctgctgtcagtgtagacttctcttttgtcatttatagagcttgtatcaaagccacaagtttagctttctgggcagacgtcccttcagggaggctgctggcctagatagatcacttgctttctgtccaccactgcactgctctcccagccttctgcttaccttcaaccgtgaggctactgccatccatgtagcagctcaaactctcaggccaagactgatctgatctttcagatcatttcaagtatcagtttcttttgccagaatgtcagagcagtgatgagtaggtgaagtctcggtaggttagcagggggagcgaaggtcactcgttcagtcaacaaaaagctctgataatgtgtttattggtcagggaaaaggttggataatgttttccagagcgtcagtcagccatcagtcaggggggctgaacgacactttttagggcatgtgccaagttttgtctcagagtcaatttatctgcatccttgaccagaagccactatgtgcagacaagcaggccaacttacagtcaccaggtctaattttttacaagtatgtcacaggtcttttccagggtctcaatctctgagtaagaacctctttggcaatactgttgttctcagtcacatctaggagtcccaaagctggggacaacattagggaagtcaatagcatccaaggccatctaaggttgttctttatttttctatacaaagggctgtttatctctttaatttagcaaaacctggaatccacaatctgcaaaagcccacagtgcccaggaacttttctagcttgttttgcactggttggtgggggaatatgaaacacagtctcttttctagctgcttcaacaggtaggccaccggtctcttctaaggactcagcttttgtgttagcactccttttgctatctctttacttttagccaccaacaggtgaagggtttggtcatgaggggggtgcctcttctttttgttagggcagtctctcacccagtgctctttttcttaacagtaaacacaatgatctttagtcaaaagctttcttttgttgccaggtactaagttttctagtttctctgacttttgtggccagcattttatttctcttatctttttttaattttctggcttcttatttcttacagatcatttctaagtgctagcattattagcatgtgtcactttgctaggttctagtctttgtcatttacctctcttcgctcctgtttcctaactgtaatggagatctcatataatgttctctctctctctctctctctctctctctctctctctatatatatatatatatatatatatatatatatatatatatctttgtttctcctccttgtctttgcttcctttggatgttatctaattatcacatctatattctgtcacttatcttttctcatagttcgcctctaccctggtttatttttctgtcttacagcacatctctgattctgattctggtctctgtctttgtcagcctcattttactggttcctcttttaaatatttttcatttagagtatctctctcatctcagacctctctaatctccttcatttttatttttacttctccttatttttttctcctctgcactttatcgaattatcctgtccttttcttaacttctgtaacttcctgttaccttggtcagattgttgggactttctagtcccacagagacgagaccctcatcagagcctggcagttagactcgcaggtgctccttacattggacagaagccccaagtgggtggatgcctccctcaatggagcttggaacagactcactgccagcagctcagggtggtgcctgagaagagaaaacacgtggggcagagaagggagtgcagctctcacagctggctgcaccagaccactgatatctcaaaatgaaagcatttttttctgttaacaagagacaggatgcaggggacaggggaatgagaagcaaccagggaacctgtggcgctcttggccggccactttcacagcctcttcttcttcttctttttggttttttttgttttttttttttcagcagccacaacatctagggccactgacttctcagggaccactcctctcttgctccgggtttcttgagctcatttctctctaggctccaggtccatgggcaggaccattgtgacacgttggctgctctctggagttggagtggaaggcagggcagctgaggatctgaaaggaagtggtcagcatagggatctgacaggattcttaggcttattttatagggcataactcaaaaacagttgtcagttgttagtccgagtcccaacacatagagacacacaagacacacacagaaaccgctttcaggcaaccaccatagaatcacagtactacagaaatgacaaacacaagcaagaccaatacagggtatcttacacgcaatttccagagaagctcactgtcactacgaccaactcaaatggacctctctccatgggaaggccccagaacctgagaccggcctaaaaccaaaccaagataatcagtcaactccttgggaccaaaacgagacctgaaaccagacaaaccaaaaacaaaacagaatcagaaggtggtccaatggaggacacacaaatgaacaagacagacagacacacagacatacagacagacaggcagggagggattctactttacctccaatgtacagtgtctgtgtctcatgacaaaaactacaaacaaaaacaagatagcaacagagaaaaaagacaccagtatatctaagcacactcgtccgagtctggacttatacaaccagccaaacgctatttcctgacggggtcggattccacctcgactcccttcctgacgaggtgggattccacgtacactcccgctctggcagagagaacactctctttccttcactctgccaggcaacagccaggtcctcctgactgttctgtactctgggcactccctccagggtctcccttggaacgtcttccaggggtgcagcctgtggggccagactgtcgtcctcccacagccactagggtccttacggtccacagtggcagctgccagaatacagaataccagaactggtaacacaggtgggactcaaaccctcaatctcagacctgaaaaaccaagacacaaattcagcggtgccacacttagacaacagacaacatacaagactcacacaagcaaacgtaactccaaggggtcctttggggttcttgggtgtcacacagatctcggtaggacctccgaaatgttaaaacctagtggggaaacacccactcaactcccgattgattcagtgtgcacccaaaaatcacgaaggaccatctcttgatgtaattacatgaggatgtttaatgacggagctccggaccgacatgcatcccacaaaggagataacggatgtcggccacgaggctcgaaagctaggggtttttatggggtaaggggcttaggggtgtggaattcagcatagtgacacactattggcttatttaaacattaacagaaagattacatgttagcaaaagggcatcaggactttgttcctgtgggctaggggcttatcttgttcacatagcaaccagttgatgtatgactttacccggcatcaaggggcagtggacagaggggaggttccagccaggtggtgttgacccagacaagatagccctgcttgtacaatcaagctgttcttaggaatgtcttaacaacagccctgtctgttctgctttgttctcagccccaggccacgggctcatagacaactcttttacatgaatcacaagatacaaaatctcattttcttttatcaccatctcccactccagcgcggtatggtgaggcgggagggatgcctcggcacatccctttccctgagttatcagccacaggacaggtataatgtagaacagtttatttgggggcatgggaagggagttgagaagggagtagaggcagtcaaagagagaaaagagaagaggagaggagaggctggccaggaacccgtggagaggaggaaggagggaggagttggggagagagggagaaaggggtcagggagagaagaaagtctgagagagagaaggggagaaggggcagagagagcgaagacatggaggggggtatgggagtaggggtcgggttgggagggaacagacccttttatagcaagccaggccttgttgctaggtaaccgttgggcggagcatagaaggactgctaacactatgggtgacaatggtcttctcccgggcatctgtacctttgaaatgtagtcaaggtagaatctgagtacacgcagatgccacgtgtgtcgtggacagccccactgtccagaaactggttcatcctgaacacccacacctccctaatgccaagtccaaattgctagtccgcacaactgcaggcaaatcaaaactggggtgactctatataccaaccaagtgctctcccgcagagcaatgccacaggccctcacgctgctccagaccgtcccgtcgctccctgcgcatccgcaggaataaaaatgttgttaagtaaaattaaacaagg

SEQ ID NO: 2211 - DNA, 1963 bp, Mus musculus
aagcaggagacttggaggtgctccagcgagccagcagggcaatcggtgtcatgaacctcctggccggaggcggcagcagcgggcggaggagccggtacagtgtatcagcggcggcgaactacagtgtagccagccggtccggtacaatgtagcggcagccaggtgggatgctatggaatatgatgagaagctggttcggttccggcaggcccacctcaaccccttcaacaagcagcttggtccgaggcatcatgaacaggaacccagtgagaaggtcacttctgaagacactttgcctgagctgcccgctggggagcctgaattccactactcggagcgcatgatggatctcggcctgtctgaggaccacttttcccgccctgtgggtctcttcctggcctctgatgtccagcagctgcggcaggccatcgaagaatgcaaacaggtgatcctggagctgcccgagcagtcagagaagcagaaggacgctgtggtgcggctgatccacctccggctgaagctccaggagctgaaggaccccaatgaggaggaacccaacatccgggttctcctggaacatcgcttctacaaggagaagagcaagagcgttaaacagacctgcgataagtgcaacaccatcatctgggggctcatccagacctggtacacctgcacagggtgttgttaccgctgtcacagcaagtgcctgaacctcatctccaaaccatgtgtcagctccaaggtcagtcaccaggctgagtatgagctgaacatctgccctgagaccgggctggacagccaggactaccgctgtgcggagtgccgtgctcccatctctctgagaggtgtgcctagtgaggcccggcagtgtgactacacgggccaatactactgcagccactgccactggaacgacctggctgtcatccccgcgagagtggtgcacaactgggactttgagccacgcaaggtgtcccgttgcagcatgcgctacctggcactgatggtgtctcggccagtgctccggctccgggagattaaccctttgctgtttaactacgtggaagagctggtggagatccggaaactgcgccaggacatcctgctcatgaagccatacttcatcacctgcaaggaggccatggaggcgcgactactgctgcagctccaagacagacagcattttgtggagaacgatgagatgtactctatccaggacctcttggaagtgcacatgggccgcctcagctgctcgctcactgagatccacacgctcttcgccaagcacatcaagttggactgtgagcggtgccaagccaaggggttcgtctgtgaactctgcaaagaaggggacgtgctcttcccgttcgacagccacacgtctgtgtgcaatgactgttcggctgtcttccacagggactgttactacgacaactcgaccacgtgccccaagtgtgcccggctcacattgaggaagcagtcactattccaggaacctggcctagacatggatgcctagaacactggagaacgccaggcaccacctgtggtggggaaagcattacaaaggtggaagcagtggagaacactttatctcatggtaaagagccggcaaaggactgggaccatggaataccttcagaagcatgacctcaggaagctacctcctcctgctgggctccagctcctaagctttccaccactttgaaaggcagcctccctacctgagggctgaacacacgaacttttgggtacatttcatattcaaacatagcaggtgtgtttgggggtttctccactaaggttactattcaggggctggagagatggctcagaggttaagagcactgtccagagttcaatttctagcacccacccacatggtggctcacaaccatctgtaatgagatctggtaccctcttctagcctgcatgatacatgcagccagtacactgtatacat

SEQ ID NO: 2212 - protein, 501 aa, Mus musculus
SRRLGGAPASQQGNRCHEPPGRRRQQRAEEPVQCISGGELQCSQPVRYNVAAARWDAMEYDEKLVRFRQAHLNPFNKQLGPRHHEQEPSEKVTSEDTLPELPAGEPEFHYSMMDLGLSEDHFSRPVGLFLASDVQQLRQAIEECKQVILPEQSEKQKDAVVRLIHLRLKLQELKDPNEEEPNIRVLLEHRFYKEKSKSVKQTCDKCNTIIWGLIQTWYTCTGCCYRCHSKCLNLISKPCVSSKVSHQAEYELNICPETGLDSQDYRCAECRAPISLRGVPSEARQCDYTGQYYCSHCHWNDLAVIPARVVHNWDFEPRKVSRCSMRYLALMVSRPVLRLREINPLLFNYVEELVEIRKLRQDILLMKPYFITCKEAMEARLLLQLQDRQHFVENDEMYSIQDLLEVHMGRLSCSLTEIHTLFAKHIKLDCERCQAKGFVCELCKEGDVLFPFDSHTSVCNDCSAVFHRDCYYDNSTTCPKCARLTLRKQSLFQEPGLDMDA

SEQ ID NO: 2213 - DNA, 3214 bp, Mus musculus
gaactacagtgtagccagccggtccggtacaatgtagcggcagccaggtgcagggcagtctgggaagtcacgtgacaagagtgatgccctcctcatgcagggtgaaaggggaacatctcaagtaaggggacaggaaggaagatccagttccaagaggtgggatgctatggaatatgatgagaagctggttcggttccggcaggcccacctcaaccccttcaacaagcagcttggtccgaggcatcatgaacaggaacccagtgagaaggtcacttctgaagacactttgcctgagctgcccgctggggagcctgaattccactactcggagcgcatgatggatctcggcctgtctgaggaccacttttcccgccctgtgggtctcttcctggcctctgatgtccagcagctgcggcaggccatcgaagaatgcaaacaggtgatcctggagctgcccgagcagtcagagaagcagaaggacgctgtggtgcggctgatccacctccggctgaagctccaggagctgaaggaccccaatgaggaggaacccaacatccgggttctcctggaacatcgcttctacaaggagaagagcaagagcgttaaacagacctgcgataagtgcaacaccatcatctgggggctcatccagacctggtacacctgcacagggtgttgttaccgctgtcacagcaagtgcctgaacctcatctccaaaccatgtgtcagctccaaggtcagtcaccaggctgagtatgagctgaacatctgccctgagaccgggctggacagccaggactaccgctgtgcggagtgccgtgctcccatctctctgagaggtgtgcctagtgaggcccggcagtgtgactacacgggccaatactactgcagccactgccactggaacgacctggctgtcatccccgcgagagtggtgcacaactgggactttgagccacgcaaggtgtcccgttgcagcatgcgctacctggcactgatggtgtctcggccagtgctccggctccgggagattaaccctttgctgtttaactacgtggaagagctggtggagatccggaaactgcgccaggacatcctgctcatgaagccatacttcatcacctgcaaggaggccatggaggcgcgactactgctgcagctccaagacagacagcattttgtggagaacgatgagatgtactctatccaggacctcttggaagtgcacatgggccgcctcagctgctcgctcactgagatccacacgctcttcgccaagcacatcaagttggactgtgagcggtgccaagccaaggggttcgtctgtgaactctgcaaagaaggggacgtgctcttcccgttcgacagccacacgtctgtgtgcaatgactgttcggctgtcttccacagggactgttactacgacaactcgaccacgtgccccaagtgtgcccggctcacattgaggaagcagtcactattccaggaacctggcctagacatggatgcctagaacactggagaacgccaggcaccgtatccacccctccggctggtgcctgctggccttgcccaccagatgtgcattctactctggagacgacccccccccccccagtatatcctccagacctcttcgtctcgggccagaaggaagtgactagtggccaccgggactcattcctcaggtgcttgtggagacttcgagtgtgtatacctggctgttgattgggtgtgctgctatcggggggtcaaaatactgcctgtgccccattgtaggactccttaggcagaggagcctgggtgtgactctccaggaaggtgggggagtcgctctcttatggcacagagccctccaggcctttaaaaccagtccttctgcaccatagagatggccttgctcctgtctagtacacccttacaactggtcagaaacttgagaggccagtccagtaagaccagaggatgcctcctgactgagttttatctctgctgaggaagatttaggttctactcagaggcacccaacccttttagcaccttgtctcctgagggacgtccggttttctctgactggggctgttcactactgtgtcccgtggatcttcccctgcatcctgagagttgtcatcgtcatccttaatctgtcagtcacgtgtgcttccccacccccctttgtacaatagggagggaaggggtctgtggaacttctcttggcagatacgcctgcttctgccacagcctagtccactttatcctggtgctctgagccgggcagctaggaacccaccctaaagaggcttagcatccagttccataggtgggactgtgtccggggaggaggttctaggtcaggtgagcctgtcagttatcattggcctcggtggcattcgggggatgaagcttttccacagaggtcactgtcctgctgacgcagtgcactgcttgaagatgaccagtcgctgggtgttaacgtaggagcctgaggtcaagagctaggaatatttgctagacccccagcaggaggcccacggcccatacaggaaggtctaagttttgaaggtgggtggggcctacacctttccacctccatgcacacaccccataaatcctacgatggaagatgtgtggagacgaggggaatctcacaataatgtggctcctgtctttcttcctgggaggcaggagttggttgtgtctgcccctttgctccttgtctgtgaattgctgttgacacacacaactagtgggcaaaggccagggcatgtcacaacctggatttccttcacctttaatgaggcacaagaagggacttctcaactggccagttgaagcttagcttactggcgtgtttgggggaaggacggacacactgccacctcctcctcactgctctttgccatcaggtggctttactcatgctgtttttctgtttcagttttcccatctggaaagcattggggagggggagttgacctgcctcagggtgaaagatcaggagtcctttgagtgtgatgtgggtcaacaatgggtccctgttccgcttcctctttggcgttaaagagggtcttaaaaccaaatgccatttcccatacccccaaatctgtgtgtttcctgccattgtatcacatgtctgtcctgagtccttggcccttcttgagcctcctgtgtaatcaacatcacgtttccaactataaatcatagtgtctaaagg

SEQ ID NO: 2214 - protein, 468 aa, Mus musculus
MQGERGTSQVRGQEGRSSSKRWDAMEYDEKLVRFRQAHLNPFNKQLGPRHHEQEPSEKVTSEDTLPELPAGEPEFHYSMMDLGLSEDHFSRPVGLFLASDVQQLRQAIEECKQVILPEQSEKQKDAVVRLIHLRLKLQELKDPNEEEPNIRVLLEHRFYKEKSKSVKQTCDKCNTIIWGLIQTWYTCTGCCYRCHSKCLNLISKPCVSSKVSHQAEYELNICPETGLDSQDYRCAECRAPISLRGVPSEARQCDYTGQYYCSHCHWNDLAVIPARVVHNWDFEPRKVSRCSMRYLALMVSRPVLRLREINPLLFNYVEELVEIRKLRQDILLMKPYFITCKEAMEARLLLQLQDRQHFVENDEMYSIQDLLEVHMGRLSCSLTEIHTLFAKHIKLDCERCQAKGFVCELCKEGDVLFPFDSHTSVCNDCSAVFHRDCYYDNSTTCPKCARLTLRKQSLFQEPGLDMDA

SEQ ID NO: 2215 - DNA, 40373 bp, Homo sapiens
  misc_feature (1)...(40373): n = A, C, G or T/U
cccttccctgcctggcagccaaggcagagagagagagggagagagagagacagcttacaccattatttctgcatatcaagagacttttatactttcactaatttgctactgctatctggaaggcagagccaggtgtacaggatggaacatgaaggtggactaggagcgtgaccactgaagcacagcatcacagggagatggtaaggcctccggataactaatgattaatgatattcatatataatcatgtctatgatctatatctagtataactcctgttgttttatatattttattatactggaacagctcgtgccctcggtctcttgcctcggcacctggatggcttgccgcccacaaccaggggcttttcttcccctcaggtccacatctgctttgacagcaaatctggccagctgcaccttcagaacacgcccacagcccagcacccctcatgtctgctgctgcctcgggtcttcctcgtcccgtccgtgcgattgtctcctcactgggctcccacagctgcctggccgctcctcacatgcaatttggcatctgctcccgtgccacgctgtccttcatatcctcttgttatatatgccccgtccacaccacgtccctaatgttctagaacattggggcccggggaatgccctccacttgagtgtcctccctgcagatatccgacggcatcaccctaggggacccttcctggccccccgtgctctgaactctcctcccagagctgctttctgtgcagcactcagcacccacttcaggagactgtgccttcaggggaggggtcaacaaagagggtcgaatggcaggaatgggcctaattaaggggtcctggagcactgaaggtgaaggggtgggagggctggaccctggtgagaactggagctacaggagaggccaccccggctgagctgaggtctctgaagggtaagaaccccatcagagcagagggagccccggagccaacaccctgacctctctctcctccgtcccccggcctccaggcaccctgacttctctctcctccgccctccagcctcttgctgagctcagctggaagtcaggggacgtccaggtcagcctccaggcagagaggagggccaggaggcgtgagaggtgggtctggggccagtggaaggtgagaacctggcccaggtctaatgtgtcatttagtccccaagtgtctcctccacggggtcagctccacaagggacttctgtgttgttcccgttggaccccttaacctagaagaatgcctgactcatggtaggtaaagatttccggaaaaaatggcttgaattgtggtctttcatgtaacaacagactggacatggagcagttccagggtggggctgtgtgttggtctcatccttactgggtgagccccttcgtccgagaaaacggcccctgctccagttgttagaaaaccgcctttacaggccaggtgtggtggctcacacctgtaatcccagcacttcaggaggccaaggcagacaggtcatgaggtcaggaaatggagaccatcctggctaacaaggtgaaaccccgtaactactaaaaatacaaaaaaattagctgggcgtggtggcgggcgcctttagtcccaactactcgggaggctgaggcagaagaatcacttgaacccaggaggtggaggttgcagtgagctgagatcccgccactgcactacagcccgggtgacagagtaagactctgtctcaaaaaaaaaaaaaatgtgattgctatgtaaaatgattgtgtgccacagagatgaccaggtttcttgtggatttcatcttaactgtggctgtcctaagacttttgtcatccacagataactgttgtcttgtttcaccatttttttttttgttttgagacgaagtttcgctctgttgcccaggctggagtgcagtggcgcgatctcggctcactgcaatctccgttccctgggttcaagcgattctcctgcctcagcctcctgagtagctggggttacaggcatgcgccaccacacccagctaatttttttgtatttttagtagagacgggagttcaccatgttggtcaggctggtctcaaactcctgacctcgtgatctgcctgcctcggcctcccaaagtgctgggattgcaggtgtgagccactgtgcctggccacattactgattctttttgttttgtttttcagagtcaagaaaaccttttttcttttgagctatttacagcttttagcagttgagtaaagtacacccctgtgaccaaaacttggtgcatttttctttctctacctgagttctccagattttggaaactgtctgtgagtattcttttttatttatttatttatttttaaaatttcagtaggttttagctggtgtttggttacatgaatgagttctttagtggtgttttctgagattttggtccatccattacctgagcagtatacactgtatccaatatgtagcctttatccctaaccctctcccaccctttcccctgagttcccaaactccttcatatcattattattattgttattattattattgaaacagtgtctccctctgtcacccaggctggagtgcagtggcacgatctcacctcattgcaacctccacctcctgagttcaagcagttctcctgcctcagtctcctgggtagctgggattacaggcacacaccaccacacctggctaatttttgtgtttcttagtagagatggagtttcaccttgttggccaggctggtcttgaattcctgatctcaagtgatctgcccgctggcttccaaaatgctggaattacaggtgtgagccaccatacctggcctattggatcattcttaagcctttgcatcctcatagcttagctcccatttatgattgagaatataggatgtttgctttaccattaacgtattcttttcttctctttttttttttttttttttttttgagatggagttttgctcttgttgcccaggctggagtgcaatggcgtggtcctggtccactgcaacctccacctcccgtgttcaagcgattctcctgcctcagcctcctaagtagctggaattacaggcacctgccaccacacccggctagtttttgtatttgtatttttatttaatttaatttatttatttattttgagacgagtctcgctctgtctcccaggctggagtgcagtggtgcgatctcggctcactgcaagctccgcctcccgggttcacgccattctcctgcctcagcctcctgagtagctgggactacaggcgcccaccaccgtgcccggctaattttctgtatttttagtagagacggggtttcaccgtgttagccaggatggtctcaatctcctgaccttgtgatccgcccgcctcggcctcccaaagtgctgggattacaggcctgagccaccccgccgggcccacactaatactttcaaatttgtcttttgtttttctgacctggactcaatgaaattgctactaactttttcccgaggcccagaaagttgaggttattctttgtaacacaggtgagaacattgtgtcagactgccaggggcttcctgctctgtaactaaagatgctttgagtctaacatctggatagatcgtgtccaacaataaacttcgtttttcttctgttttcatagaaatacctcttattaaaaatctgttcaccttcctcatatacataagtttagcccatctgcaacctcctgttatgggaaatagctgtttaacggaactgatcttgtctcaggaccaggaaatcactacaaagatatgtgacagtgtatctaaatttgttctttcctgtctatcccaatgtgtcttttttttttttttttttgagacagagtcttgctgttgtctcccaggctgaagtgcagcgatctcagctcactgcaacctccgcctcccgtgttgaagcgattctcctgcctcagcctcctgagtagctgggattacaggcatgctccaccacacccagataatttttgtatttttagtagagatgaggtttcaccatgttggtcagggtggtctcgaactcctgccctcgtgatccgcccacttcggccccccaaagtgtgggattacaggtgtgagccactgcgcccggcccagagggatcttttgaaaacaaaattataccacttctctgctcacaatccttcaatggagagaccgaccacaccaagtgctggtgtggacactgaggtaccgccggagcactcacacctcccagcaggaacatggaaaggcacaaccgccatgggagaaagcttcatgcgtcctagggagtaaaaacactgcacgtaacccagccgttcggttgctaaatattgtcccggagaatgaaagcattatctccacacagtgatgcacacgcaaatgtttatagtagctttattcataatagcaaacactggaaacagcccagacgttcatcaacaggtggatggatagacagtgtggtcatccatgcatactcaggaataagaggggtaacccacagacatgtgctgccacatagatatgtctcagaataagtatttttagtgaaaaaagctatagatgaaaaaggcctacatacgatgtgattccacctgtatacaattagagaaatgcaccttattgacagaaagcagctcggtggtgtctggggacagagctgggttgcagcaggttgcaaagggcacaggaaatatttgaggataatggatagctttttattcttttttacgaattgtgatttatttattctttttcacttttgtggatacatttatggagtacatgagatattttgatacaggcatgcagtgtgtaataatcacatctggttaaatgaggtatccatcacctcaaacatttagcctttctttgtattacggtccagttatacttctttagttatttaaaaatatataataaactattgtagactatagtcactctgttgtactaccaactattagattttattcattctatctaactatatttttgcattcattaaccatccccacatctccctccacctttcccagcctcgggaaactatccatgagtttaactctatgcccatgagtttaattgttttaattttctttttttttttttttttgttttagatggagtcttactctgtcgcccaggctggagtgcagtggcatgatctcggctcactgcaacctctgtctcccaggttcaagcaattctcctgcctcagccccctgagtacctggctaatttttgtatttttagtagagacagggtttcactatgttggccaagctggtcttgaactcctgacctcgtgatccccccgccttggcctcccaaaatactggaattacaggcgtgagccaccacgcccagccaatttttttttttttttttttgagaaggactcttgctatttctcccaggttaggtggagagcagtggcgccatctcggctcactgcaacctccgcctcccgggttcacgccattctcctgcctcagcctcccgtgtagctgggactacaggtgcccgccaccatgcccagctaattttttgtatttttagtagagatggggtttcaccgtgttaaccaggatagtctcgatccaccagcctcggcctcccaaagtgctgggattacaggcgtgagccactgcgcccggccccggccaattgttttaattttcttttagcctccacaaataaatgaaaacatgcaaagttcgtctttctgtgcctggcttatttcacttaacataatgacttccagttccatccacgttgttgcaaatgacaggatctcattcttttttacggctgaatggtactccgttgtgtaaagtaccacattttctttatccattcatctgttgatggaggatagggttactgtctgcttccttcttggtgctcatcacatctctgctcatggtcatagtttctcaggtgtatacatgtgtcaaaatctatccagttctacccttaaacatgtgcggtttattgtatgttgattatatctcaacaaagctgttaagagacgaagcgtggtggctcatgcctgtaatcccagcacgttgggaagttgaagctggtggattgcctgagctcaggggtttgagaccagcctgggcaccaagagaaaattccatctctactaaaaatacaaaaataaggggttgggtgcggtggctcatgcctgtaatcccagcactttgggaggccgaggaaggtggatcatgaggtcaagaaattgagaccatcctggccaacatggtgaaaccccgtctctactaaaaatacaaaaattagctgggtgtggtggcacatgcctgtagtcccagctacttgggaggctgaggcagaagaattgcttgaacccggaaggcggaggttgcagtgagccgagatcgcacctctacactccagcctggtgaaagagcgagactccgtcccccacctgtccccacaaaaaaattaggaaggtgtggtggcgtgtgtgtgtagccccggctactagggaggctgaggcaggaggatcccttgagtccaagaggttgaggctgcagtgagccgagattgtgccactgcactccagcctgggcgacagagtgagaccctgtttaaaaaaaaaaaaatgctgaaagaaatttccaatggcttccatcttaccacaaatcaaagccaatgtgtttaccattagctcatagcctcccgtctctggtcctctcccctcactttacctcatactaaactccagccacatggacctgcttccagttcctcattcataggaggctctttcggttcctcaaggaccttgcactcatggtttctacctggatgcccctcccactcttcagtggttctctccttctgacccctgagtcttggctcaagcatcttcctcccctgatctcagtcaccgtctcgtcaaactgtttatttccttgtgctcatcacatctctgattagtttgcatctttgcttgtctggttccttgagtgatgggaccttgtctgttttctcaccacagtgtcctagtgctttgagcagagcatggcatatagttggtgctcaataaatttgtttgtggtggctcatgcctgaaatcctagaattttgggaggctgaggtgggcagatcacttgagctcaggagttggagaccagcctgggcaacatggcaagaccctgtctctataaaaaatacaaaaattagctgggcatggtggtgcatgcctgtggtcccaggtacttggcctgaggcgggaggatcatttgagcccaggagatggaggccagtctgggcaaccccatctgaaagaaaagaaaacaaaatagtaaatgttctaaaccagtatataaattatctgtaactgcagattctcccaggactctgggaggctaagcctgggtgatcacttgaacccagccattcggggctgcagggagctgtgctcatgccgctgtgctttagccagactgagatcttgtctcttaataaaaaataagaataaaatggggccgggcgtggtagctcacgcctgcaatcccagcactctgtgaggctgaggtgggtggatcacttgagtccaggattccaagaccaccctgggcaatgtggcaaatgtctctacaaaaaacacaaacaaaattagccaggtggcggcgcttgcctgtgatcctggctactcaggaggctgaactggtagaaccacttgagcctgggaggtggaggttgcagtgaggtgagactgagccgctgcactccagcgtgggtgacagagtgagaccctgtcccaaaataaataaaaatttaaaaattaaaaaaatgtgttgttgaatgtctacagaggaatagagatggtcatgacacactctatgtttatttacttatttatttatttttagagacagggtcttgctctgtcacccaagctggagtgcagcgggtcactgcagcctcaaattcctgggctcaagcaatcctcccacctcggcctctcaaggtgctgggattccagccatgagccaccgcgcctggccaacacattctgattaagaaagtagaccttaaactgcgtgtagagtgtgggtttatctttgtctctccttggaggagggttcccattgcttctgtagacactggttcagatccacaaccggttctaacatgcatttgggcagtgggccacctgctgggaggaacctccttcctctcagggccagcctcaaccggggacccattcctttctcagtccatgcaaggaagcaccctctgtgtccaggcactggccattaagcagcaaagaaggccaacaaaatgctgcctacggctctttgcttctggtggttggggctggggggcagaaataataaagaaaaatgtgcaaaaccgaagacatcagacagtgacgagtgattagggagaaggtgagtgagtgaggggaagggccctgcctcccagagatcactgaggactgctgagcagaggcaaggaggaggtgttggggttactggggaggactgctccacagaggctcagccaggcaggggccccggtgggggtgggcctggcttgttggggagaggagccaggaggtgaaggtgggggctgactttcttcccagggtccctctcactgccaggctgaggatgtactgtggggcccaggtgggagctgagatggggaaggcctttccagaaggaggagctgggagagaggccaggtggacgtggaatctctaggactggggaccttgaagcagcagatagagcggcggctcagggcagtctccctccaggtctgagtgcatggagggacacggcgtccgaagccaccctaagctggggtggaatctcactgcaccctttctgagcgatgtggccttgggggggccgatggagttgcctgtcctgtaggtgactgctggcccccaggcttccgtagggttaaatgagatggtgttggcaacacgccccccaaaacctggccataaactggtcccaaaactggccataaacaaaatctctgcagcactgtgacatgttcatgacggccatgacgcccacgctggaaggtcgtgggtttaccagaatgagggcaaggaacacctggcccacccagggcggaaaactgcttaaaggcattcttaagccacaaacaatagcgtgagcgatctgtgccttaaggacatgctcctgctgcaggtaactagccagacccatccctttatcttggcccatcccttcgtttcccataagggatacttttagttagtctaatatctacagaaacaatgcttatcactggtttgccgttaataaatacgtgggtaagtctctgttcgaggctgtcagctctgaaggctgtgagacccctgatttcccactccacacctctctatctctgtgtgtgtgtgtctttagttcctctagcgctgccgggttagggtctccccgaccgagctggtctctgcaaggtggtgtgtggctcccacttgggaggcctccagttactggcactgtcatcaccatgcccactgaacaaagtggaccaagccccagaggcagccaaaaccacacctttctgcagggagggtaaactgagcccgcgagctcagggcaagcgcaccaggcgcatatgctggccttcatctgtcctcagctcctccctgcgggcacaagcgggggcagctgaatcttccacgcgagaagcctaagagtagggatacgggggcggggagcagcaggcctgctctgtgtgtaaacaacgggaaagcaggaataacgccagggcccgcggacaccagctgcctccgaagtcccgctgcccggcgcctgcatggagcagcctcctgagcgcagtgtggcgcgtcctcctgtgtaaagagggtagagccgcgccgggtccctccctctgcagccgtgaagcccccgcggggccctgcaggtggctggcggcacctgcacacggtggttctctgttcctttttcctcctcaaccactgaggttaaaaaaagtgttaaaagccaccctttttgtttttttgagacggagtctcgctctgtcgcccaggctggagtgcagtggtgcgatctcggctcactccgagctccgcctcccgggttcacgccgttctcccgcctcagcctcccgcgtagctgggactacaggcgcccgccaccgcgcccggctaatttttcgtatttttagtggagacggggtttcaccgtgttagccaggatggtctcgatctcctgacctcgcgatccgcccgcctcggcctcccgaagcgctgggatgacaggcgtgagccgccgcgcccgcccattttttttaaacgtgttggggtttgggtttcagccacaggccttctgcgatgagaggaaacccaggacgcgcagccccaggtcaggcccgcggaacagccgggcggactccggggctcgcagactcgcgacccgcgtgccatgaacctccgcgccggaggcggcagcagcgagcgcggggctggatccagcgtagcggggcggccgggcggatccagcgcagccgggagacagatgcgaggcggcggtcaggtgagcggcgcggggccggcggggtcggggccggcggggacggggccggcggggacggggccggcggggacggggtcggcggggtcggggctgggagggacggggccggcggggacggggtcggcggggacggggctgggagggacggggccggcggggacggggccggcggggacggggccggcggggtcggggctgggagggacggggccggcggggacggggtcggcggggtcggggctgggagggacggggccggcggggacggggccggcggggacggggccggcgaggtcggggccggcggggacggggctgggagggcggcccgcccggcgcaggggcctcgagacctcggacgaccaaacccggggaagccgacgctgctccggcgatacaaacagatgcgtgcggagcacccgggcggctcaggggacccgcgtggaagaggcacagaactgagcagatccagaacacagtaaccccatcggaggaacgggtgggtgggcgagacctgcccacaaggagcccgggagaccgagcgaaccccagcgggtgtcgaggcatgcgagcgacagagccgaggtggcaagaccacaaacaaagaccgaaccaccgaaacgcacagagggcacagcccaacacgaaggcagcagatcagagaaggccggaccagcaggggaagaaaggaaagaggagaaacaagaccacaaagagagagaaggaaaaagcggacacggagagacggaaagaaaaacaaagacagcgaacgcgagacgcggcagnnnnnnnnnnnnnnnnnnnncgacgggaacggggctggtaggtcggcccgcccggcgcaggggcctcgagacttcggccgccccaccccggggacgccgccgctgctccggcgtccacaccagctgcgtgcggagcacccgggcggctcaggggacccgcgtggccgtgcccccgccctgggctgctccgagcctcagtttccccctcggtggaacgggtgggtgggagagacctgcccccgaggagcccgggagaccgggcgagctcccgcgggtgtggtgggtggggaggcacagtgctggggtggcttctccctgcagcaggtgccgaacccacggccaggcttccgtggccagcagccctagaggaatggccatcctgtccctgcgagcccctgggccctggcaggcgatgcaggtatgggcagacaggacgctgttgactccgcacaccggggtgacttctcaggttctcggggtggcagctgcagtgatgacaccgcttcctggtggtcacgccgcgggcaggacgcgggaggccaggtccgtgcatcccgcgtgtcctgagcttcggcccagggtccctccgtgccccggaaccccgccggctttcttcggcttcctttcattgctaagttgtggggtcctccccgatgagagcagtgggctctagaggaggggcagggggtggccagacctcttgctttcactcttccacttcctgcccgctcctttctgaggccaagtcccacatctgggtgcagaactggtggggtgagcctggtgagaggggcaggctggcgttctgctcagagtcggccactgtggccggcatccccaggtctgtgtgagcagaagctaaggctgcgaggccagcggcctcccctcattcatcccctgcccgtgcgccaggcctggggctggcactgactgtcagtaaataggcaaataaaagatgccttttttcacagcccggaggagagctggtagcctagagtacagctgctgggcagaacggaggtgtccctgccagcgtgccttccttgacgctcctctggccatgttttaaacaccaggaggtttccagcggcttccccaggcgtagctcctgcacctttttcctgggctggtcaccatatgtgatgacagtgccagtctgttctgagcagctctgggctcctggcttcactgacatcataaacaagtccttagcccttccatccaccccagaaagtaggtgttccccctgatttataggcaagacaatggagaaccagagtctaaatcagggctgattttttttttttttttgagatggagttttgctgtgttgcctaggctggagtgcagtggcacaatctcggctcactgcaacctccacctcccgtgttcaagtgattctcctgcctcagcttcccaagtagctggattacaggcatgcaccaccatgcccagctaatttgtttgtgtttttagtacagacggggtttcaccatgttggtcaggctggtttgaactcttgacctcaaatgatccacccgcctcagcctcccaaagtgagccaccacacaccggccatgattcttaaaaataacagtaataggccaggcatggtagctcacacctataatcccagcaatttgggaggcagaggcaggagggttgcttgaagccaggagtttgagaccagcctgggcatcagagtgagactccgtctctacaaaaagttaaaaaaaattagctgagtgtggtggcacacactggagttccagctacttgggaggctaatatgggaggaccccttcagcccaggagtttgaggctgcagtgagctgtgatcgcaccactgcactccagctcgggtgacagagcaacaccctgtctcaaaaaaaagtaataatgataaattataatcaatatttattgggtgcttactatgtgccggccagtgttctctgaacttagtattaactactttaatcttgacaataaccctgtatggtactattgtaatccccatttgagacatgggagaatggaggcagagaaacgtttatccacttacccaaggtcacacagctaggagctagcagagttgggattcaagctggacgtgtctgtcttgttaccatgaaactattgggatcatcagtcagaatcttttcttttttttttttctgagatggagtctcactctgtcacccaagctggagtgcagtggctcaatctcggctcacctcctgggttcaagcgattctcctgcctcagcctcccaagtagctgggattacagatgcccaccaccacgcccggctaatttttgtatttttggtagagacggggtttcaccaggttggccaggctggtctcgaactgctcacctcaggtgatcagcccacttctgcttcccaaagtgctgggattacaggcgtgagccaccgagctgggtctttcagtcagaatctactttggccgcaagagacaaaaacctcccctataacactggtgggaatatcgtatttctctcacttgaatgaagtctggctgtgagcagcttagggctcaggtgcagtcccctgcaatcacgtcactctccccagtgtggctattccagctgcagcctttacatctgcattccaggcagcaggaggcagggatggctgaagaggggcagcccctacctttaaggacaattctcagaagtcttttcttttttctcatatgtatgtatacacacacacacatatatatgtatatacacacacatacatatttatgtaaaaaagattttttttttttttgatatggagtctcgctctgttgcccaggctggagtgcagtggtgcgttctcggctcactgcaagctccgcttcctgggttcacgctattctgctgcctcagcctcccgagtagctggggctacaggcgcctgccaccacacctggctaattttttgtatttctagtagagacagggtttcaatgtgttagccaggatggtttcgatctcctgacctggtgatccgcccgcctcggcctcccaatgtgctgggattacaggcgtgagccacggcgcccagcccatatttgtataaaatttaatagagatagggcctcattgcattgggcctggccggatgccgtcctcctgccttggccttccagagtgctgggattataggtgtgagctaccacgcccggcccattactgttgttttcagatagccctgatttagtctctggttctcccttttcttgcctataaatcagggagaacacgtacttcctggggtggatggaagggctaagcacttgggtatgtcagtgaagccaggagcccagagctgctcagatctgcctgatcttctcaagccgagggggtcagaacagtcactttaccaggtctagctgctggggaggctgggaaattatgtgacaaacaaaaatgaggctcctcattcaggaagaaggaggagtgatgttgggatggcctgatttctcctgtgtcctgggtgctccctgggagactggggaggtgctggcatcgggtggccgcctctgactctgtgacccacccacagtcatcaggtaataagagaaggaggtgggactggggcccactcacgttccctgtgtcttccccgtgcctccctgttggggtccacgggcagcctgtccatgggtgctttgtcctttcaggctggcgtgcaggtgcccaacccacactcctgccccacaggcacaacaggcaggacaggccccataggtggtgtggagtcttgcccagttgcagggcagccatgtggggttggggtggcctccttatcccactgccagtgaggcaattagttcaaatcccagttcttccaggccacagtgtgaccctgagcagggccgtcccctctgggctcagctctctttcttttgggagaagagacagaggataaatcataggattgattattataattgtgaattatttcagactgtagcaggtgtagtgaaagcataactaacactgtagcaggtgtagtgaaagcataactaacactgttgcagttactgaacaactttaaaaagacatctccgactttctataacatcaacagaccttacagcgagcttactttgtgctcagtctctgttaactcatttcaccctcacaatggcccattacggatggggaaatggaggcagagaggctaaggaatgtggcccaggaagttaagtgggagggctggatgccaactgcctctactcccaccccaaccaaagtcccttcctccctgccaggagccatcagccctgtgtgttctgcagtgttctgagcctccgggtggggaaagagcaattcttgatcctgagcttctgccacgtggagaactaggcccttccggcctgtttcctgggttcctgaggcacagagccgtgggcctggttcaggtcgtgttgctcatcacaggatcagaacccaggccagagagcctggatgcatttgtagggggcttctctgtgtgctggcagggaatcctcccaagatcccctgctcctgggcatggggaaggtgggccctgctcactcacctgtggcagagcaggaatgggccctggaactgtccccaagtgtccaaccctaagtcctgagacaggggctgtggtttcagggtgctctgacaagaaagcacctttgcttggggcccaggaaggaggaacccatttctgagaggtgtgtctcacatagcaggtggatagcaagctagagcggggctgagtgagtatctggggctgaggcccagagaggatcccataggtagctctagggctggagctctgcaacattgggcaagaggaccctgtgctgggaggcagggagcttgggcccctcagatgggccacgtgccctcgtgggaccctcattgtcaccgtgagctctttccaaggggacgccaccagtgggggcctgggcaggaggcagctgaggtgtttcaggaaaaggctgaagatcaaggctgtggtgtgaggactacccactttagggaagtgaaagaggccagcctcaccccagacaccccagtgtggttggggaaagggggtggtccgtggtgagcctggtacctggggactcatcctggccctgcctggccctcaggtgggatgctatggaatatgatgagaagctggcccgtttccggcaggcccacctcaaccccttcaacaagcagtctgggccgagacagcatgagcagggccctggggaggaggtcccggacgtcactcctgaaggtgggtgctggtgggagtcagggtgggagctgggcaggtctctgactgcttacgtggacccctcctttcttcctgccgcgtcctgcgcagccctggctttcccacggagccggcacctgctggctgtgttctttttcccatctcttctgtggtcgtgtggtttgtttctgtgtccccactagaattcacattcctgagggcaagatttgtgcctgacccatcactgctgcatcctagggcccagcacatagtaggtgctcagggaacacttgctgagtgcggtcagcgctgagacctggtaagggagaggttagccgagggaacgtgctctgggcgtcagggtggcatgagctttagaaactgcagatgaggtcatcagggagtgcttggagcggggcagctgcagagacggcctggagtcgacactggggttcgtggattttgctgtgtagccatgcagtggtttttctctcgcccccgtggtcacgcatgaggtgtccaccttagaaatgggatgtctctataatgctgtcttgaggacttttggcaccgagtgtcattccacctcctcattttgagtggctctttcctgtctacacaaggctgtgggctcctctgtgaatgcagactggacggtgtgcagatctgagtggtgcccagctctcacggtgcctcctttctgtgcggcttcctgaatccctttcccactcctggctatctcagctcctccctaggggatgggaggcaggaggtagcagctgacgctccacacctgtccccgtcttcctccagaggccctgcctgagctgccccctggggagccggaattccgctgccctgaacgcgtgatggatctcggcctgtctgaggaccacttctcccgccctgtggtaaggttttagatctcggaggggagagggactgagggaacccccaaggcaggaagggccagggtttccttgtcactccctcccaggtggcagggcagtgtcctgtgagctggggtacagtctcactccattgtcaggctcagcagcccccacctcagccagggctcctggcttcgaatctgaggcctgcatgacaccacagacccccaccctcagagcctgagtgaaggcaggtggagagagcctgggattggggttcatgaacctggggctgcttctgtcccctgagctccatgtcttcatgaagcaaatgtgcagagaatagattccctctggggtccttgaggtcctgtacacttgccgagagtcagggtgtgggaggcaaggggaagccccttgtctgcctcgtactgaccagtcggtattacagggccactcttgtttgttccgtgttttgttccatggaagccttgtgttgaagaagaaaagggggaggatataatgatttttttaaaaaagtttgaggccgggcgcggtggctcacgcctgtaatcccagcactttgggaggctgaggcgggcggatcacgaggtcaggagatggagaccatcctggctaacacggtgaaaccccgtctctactaaaaaatgcaaaaaatcagccgggcgtggtggcacatgcctgtagtcccagctactcgggaggctgaggtaggagaatgatgtgaacctaggaggcagagtttgcagtgagccgagactgcgccactgcactccagcctgggtgacagagtgagactccgtctcaaagaaaaaaaaagtttgaaaaccttttatttttatgcaaaccatctccaacttttgagggaaacattacggcaacattcaaatgtaactttgaaaggatttgggccagacgtggtggctcacgcctgtaatccagcactttgggaggccgaggcgggcggatcgtgaggtcaggagttcgagaccagcctgaccaacatgctgaaaccccgtctctactaaaaatacaaaaaaaaatttagccgggcatagtggagcgcccctgtagtcccagctactcaggaggctgaggcaggagaatcgcttgaacccgggaggtggaggttgcagtgagccgagatcgtgccgctgcactccagcctgggcgacagagactccgtctgaaaaaaaaaaaaagagggagagacttcatatatttgtttcgtatcttattttttttcctttttcttgagataaggtctcgctctgttgcccccgctgtgaagtgcagtggcgcaatcatggctcactgcagcctcgacctcctgagcccaagcgatcctcccacctcagcttcctgattagctgagactacaggtgtgcactacaatgctcagataatttttcattttttttttatagacacggggtctcgctctgttgcccaggctagtctaaagctcctgagctcaagtgatccacccacctcggcctcccaaagtgctagcattataggtgtgacccactgcactcagcttgttttgtatattacaacattttgagcacttcctttgggccacaggctgagctgcaagggggaggggagggtgccacctcccctttgcctgggtctcagagcccagcagcctggaggaggaggatggctcctgagggcggggtccaggctccccagcactgagacctgatcctgtcttccccgggatccccagagtgttctgagtctggggccttgctgggccgtgagccccctggtcgctatgtggcgaaagcaaccagaagtgctggggctggctctcggcatgtgcttgggcttggcagtcaagctcgaggccacttactgtccttcatgacagcaaatgtcctttccctagctttcctccaagaggaagctcttcagaaggaagtgaagtgacataacaaaaaagcatctggatttctcaaagaaggaagttgtcttttgaaaagcaactttcaaacattaggttttcagaggtctgtgggcaggcaggtcaggctaggagcacgcagcaccgggtggaccttgaccgtgctgccacctttcctgccctggagcaagtcctcggtgccctctgggttgagtttccttctctgggtgaggggtgtcggggtctgctctgggcctgtctcggcggatgggccttaacagggagctcctgcaggatgggcctttgactgcccccgcccccaacctgggcagggtctgttcctggcctctgacgtccagcagctgcggcaggcgatcgaggagtgcaagcaggtgattctggagctgcccgagcagtcggagaagcagaaggatgccgtggtgcgactcatccacctccggctgaagctccaggagctgaaggtgggtgtggggccgccccgccgtggggcagcctggggccgaggccagaactgtggaactaggaggaccctgccagcctctggctctctctcaggcggtggtctctctctcggcctcaggggctgaggtagaagggcacgagacaggcagggtggaagacgggccctcaccccactgcgggaggtttccctattagcctagaccctcctgttgcaaggaacagaaactcaaccctgagtagcttaagccaaaaagaaaaatgtatttgcttggtgactggaagatcctccagtgtcaggaatcttgctctcttccaactcgacttcctgtgtctgatccagcctcaggcaggccttccctgtgcggtggcagagacggtcccggcaaccacatcttgctttccaggagctgagcctccctgtgcagatgacagctgccttttcacagtggttatagcaggaacctcaggcctgactttcattggccagtcctgaccggatgacagtggctgactggccagttctgggtcatgtgcccacccctgacccaatgacagtggccgattggctagttctgggctgtgtgcccgcccactgacccaatgacggtggccgattggctagttctgggctgtgtgcccacccactgaagcaagcgggtgggctaagtaagttcctccctgagtgagccacatggacaaggacgggtggtgtcttgaaggtgacaacaaaagaaggtggtgggtcccaggccacagatgttcctgatgcagtccttgggtctgtgtgtgctttggcctggctgccctgtgtcccctgtgctgattcaggtatccctgggaatgtagaaagtagaatattcatgaggaaacaggtaaattggtggtaagaaaaaaaaaccccaaaacatagtggcttagagaagatgtgttcgtttcctcacgtaaaaatcccataggtggtctggggcctctatgacagctaatggtgttggggagggcctccttttccattgccctgcacctaaccggcaaaaagcaggaggggcagagaggccgggtcgctcccgctcacatgcccatggcccggtgcaatcccacacagcccctcgctgcaagggatgctgggaaaggtcgcaagggatgctgggaaaggtagcatgtgaccttggcggtccttgtccagctgatcattgtttactgtgaaagggagaaaagggacatggcattgtgctgaaactcacaatctctgccctaaatggtgcctggaagaaataagttgaggggcttgtgcgaagggaaaggaacttcagcccagctcacctgtgaccccctccctgactcaccctctgcaggaccccaatgaggatgagccaaacatccgagtgctccttgagcaccgcttttacaaggagaagagcaagagcgtcaagcagacctgtgacaagtgtaacaccatcatctgggggctcattcagacctggtacacctgcacaggtgggccgagacccagacgaggagtgaggaatgagagagaccaaagttcctgcctccgctgggctcacattcagatgtgagctatccagtgtggtggccactagccaaacatggccagtcaaagttaaattaactaaatatgcatttcctcgttgtactgtctacattggacagggctgttctggatgagaaattaaactagtgaattacatggtgtgtctagtttgtacaatgaagaaaaagggaaaggacctagcacgtgttagggtggagtgaatgtgactttagggcagaatgtaaaggcatcacgtgactttgttttttgtttttgtttgtttttggtttggttttgtttttgagacggagtctcactcaatcgcccaggctggagtgcagtggtgcaatctcagctcactgcaagctccacctcccgggttcacaccgttctcctgcctcagcctcctgagtagctgggactacaggtgcccgccaccacgcccggctaattttttgtattttttttagtagagacggggtttcaccgtgttagccaggatggtctctatctcctgatcttgtgttccgtccacctcggcctcccaaagtgctgggattacaggcgtgagccaccacgcccagccggcgtcacgtgacttttaagcaaaaacttgaaggtcagggagcaagccaagacaatatgtctggaggaatgttctggtgggggcagccctgtggttgatgtgtccagtgccttaaggaggagcagagagccaggtgtggctgcagctttgtgtctggaggactgttccggtggggacagtgctgtggttgatataaggaggagcagagagccaggtgtggctgcagctctgtgtctggaggaatgttccggtgggggcagccctgtggttgatataaggaggagcagagagccaggtggggctgcagttctgtttctgggggaggtgggctcagaggtggctggggcttttctttaagtgcagtgggggccacaagtgggtgctggacatacttgagctttaataggttactgtggctgctgactgagcttggactgagagggaggtgactgagaagagggggatgactctgattgggctggggtaggtggtgggagtgaggagtcgctaagggcagtccagctgaaggtttggaaacggaatgtaacagattagaaaatagtctgactgagtgcggtggctcacgcctgtaatcctagggttttccagtgcaaagatgggaggatcgcttgggccctggagtctgaggctgcagtgagctctgattgcacgactacactccagcctgggcaaaagagcaagaccctgtctcttaaaaagtacaaaaacaacaacaacaaaaacagagagagagaaacccttcaggataactcatgatattgaaagggtggagctgctgaaaccgagatggggaagctgaggggcttggggtcgggggtgggagtttcgtttgttacatttggacaggttgggtctggtggtgggagtggcaggttggccccaaacatgtgagtcaagttggaggacaaggtctgggccacctttggggcaaggctcaggggccagggagaaaaggatctttgaggttctaaggcctcccttggtgccaggaggtcttagattgatctgggcctcagagtggaacccacggggagggggcaagccagctgagggtggcctgggctgcaggcgcacccttcccgcttttgagaagtgtgtgtccctccaccctagggtgttattaccgctgtcacagtaagtgcttgaacctcatctccaagccctgtgtgagctccaaagtcagccaccaagctgaatacgaactgaacatctgccctgagacagggctggacagccaggattaccgctgtgccgagtgccgggcgcccatctctctgcgtgagtggtggcagggagagaagagggtgagggagctgttcctggcggggagccgggtgcacaggtgtgtaagggcacgtaagtcagacagttgagtgaggccctggggcagtgcctgcttgatatctttaggaagtgacaagggtctgttgctgccattgtttcatttctcactgaagcagactgaggttccagccgttccgtgactcacccaggtcactgaggagcacctggagggctgggacctggcctccgcctccccgtgtgaaagcctcatagatgaggactagggagaagtcacacagcacagaaagcctcatagacggggtctagggagagtacacggttgtcgcccagttgtgcacatgtgcgcgtcagctcttctttctagagagttgctggtgttaattcatgaagtccctgcctcggtcctacagtgaggccctgtttatatcccattttactgataagagaacaggtcagtgagacgctgggaccacctgaggtcttccggctgaggataggacatgttcccatgtctccccgagggctgtggtccatgggaggacagaccatgaggctggaaagctgtgtggggtttttgtgaggcagggacactcagggcccctctgaccctgcagggggtgtgcccagtgaggccaggcagtgcgactacaccggccagtactactgcagccactgccactggaacgacctggctgtgatccctgcacgcgttgtacacaactgggactttgagcctcgaaaggtgggggttggaaggtgggggcatccccctggggagggagagcaggaagggggttggggtgtggagccggtgtacccctggttgggtgttgcccgctgcacgggccctgggtgggtgtgagaggtgtcacccggccgtgcctggcaggtttctcgctgcagcatgcgctacctggcgctgatggtgtctcggcccgtactcaggctccgggagatcaaccctctgctgttcagctacgtggaggagctggtggagattcgcgtgaggctggggccatggaagtggggggcgggggcgctgtgtcaggtgggccctagggccgggccagtaccctcttctcctctgggccacgggaggttctgagcagaggagggaggccacctgcttagggtgagccaggcgccgcggctgcccttttggttgaaggtgctggagcggtgtcccgtagtgatctgatgccaggtgtgaacacaatattaaattttgtaatagccacgttaaaaaagtaaaaagagctgggcacggtgctcacacctgtaatcccagcacttgggaggctgaggtgggtggatcacttgaggtcgggagtttgagaccagcctgaccaacatggtgaaaccccatctctactaaaaatacaaaattggccgggcatggtggtgtgtgcctgtatcccagctactcgggaggctgaggcaggagaatcacttgaacccgggaggctgaggttgctgtgagccgagatcgcgtcactgcactccagcctgggcaacaagagcgaaactctgtctcaaaaaaaagtaaaaagaaacaagtgaagttaatgttaatagtatattttatttagcccaatatatccaaaatgttatttcaacatgaaatcaatgtacatttttgagatatttgctttctttttcttttttgtgccacgtctttggctccagcatgtagcctctgctaagtctcactgcacagcggccactttgaggtgctctgtggctgtgcagggctggtggccactctcttagccagcggtgagggaggaggtagggcgggagccgagggcagacgggagctgcagtcctggcaggacatgatggcgtctcacgccaggtagtgaaaggaggcaggtcccattttacccaggaggagactgtggcagcacgttgagttgccaaggccagggctggggaggcagctgggatttctccggaagtttggcttggtcctgaggctgctggttcctagacagttgtgtgcctgtggggccgggtgagggcagagggaagggagggttttctggaccacggtaagtgagcctcacggtcctgcccagcctgggagctgtgattttgggttttggtgaagcactcagatctcggcccttcgtggggaaccaacccctcctggccctgccgtggccccgggtgtgcggcccacacaggggccgccctgtgtcctggctgaggaggcctgcctgctcccgccttgtttgcagaagctgcgccaggacatcctgctcatgaagccgtacttcatcacctgcagggaggccatggaggctcgtctgctgctgcaggtcagactgccagcaggactggcccccgatgggaagcgcagccagggtggtgaggcacctcaggctcaggttttttccggacagcttgtgcgtggagtgcctttagcagagggtcgcctcaccacggtcccaaggaacaaagcaaacaggtgttctgcctacaaaagagttctccagtcagttccgtttggcaaaccctgcagcccttatgtgaatctccatggggtgggtccagcccagccctcgtcaggcaggttgaccacaaaacacagttttcaaggttcatctaattatgtgctcaacagatacagatgttctagattctggaacagtgaacgaaacagacaggaatgcttgcccttagtgcctttcaagtagggaagacaagaaaaatacgttgtgtgctggggtggtgaactctgtgacaagatagagaaggaagggtggggaatgtgggaagcgtggggagtgcggggatgcggtgtggctgggaggggctgccttagggagtggagggcggggggctacacaggtcaggaaacgtggcccgggtccatcttcccctgtcggcttcctggggctcctggattctactcctggggcccagacccttgtgtagctcgtttctctgtgagcacctgggccctgaccactgcagcgaccatgggtgggcggtgggaggggccctccccggtgcagggcgtcacggctgctgggacttggcagctccaggatcggcagcattttgtggagaacgacgagatgtactctgtccaggacctcctggacgtgcatgccggccgcctgggctgctcgctcaccgagatccacacgctcttcgccaagcacatcaagctggactgcgaggtgggcctctgcccgagggccgctcttctccaaccccagccctgaggggggattggcaggagaagcagcccagcccagtgtgtccctggcctcagagtgcccagaggagctggcactgacgtgcccgtgccccaaccccacactgttccccccagcggtgccaggccaagggcttcgtgtgtgagctctgcagagagggcgacgtgctgttcccgttcgacagccacacgtctgtgtgcgccgactgctccgcggtcttccacaggtgggtgtggcctgggccccgcactcgggggctggggctctgcgctgtcctctggggagctgccccttggcctccggtaggatgatgccgtgggagctggcactgctcccccgagaaaggggagacataaagactctttgggtctttgctgaccctgagatatgaagtcagaccctgatgtctgtgactaaatgagaagttcccttaggagcggcacctgggggatgagggggctgccccttcccaggtccctcccggaccagcccctgaaactccagcttggtctctgatgtgttcacagcatcccagctgctccctttctctactaggattgaagtcactctttcagggttagtataggctagagattcccaaacctatagttcctgccaccctttaatgtctcagtaattttttcaaagtgtttctaagccagaagaaattcctaacactttgatttattaagtacttatgctctcgcgttttttttcctagccgctagaccaacagggaaaaatacttatgttcaaacaactttataagtatttgtatcctaaagattgagtggctcttggaaaaataatgtacacaaattagaagaaaaatattttaatttcattcttcagtaagtatgattacttactaatgatatgggtacaccttttgggcctcacacatcttccagacctggaatcagatggacactcccccccagtttctgtcccctgatttttgcctggaatttgctatttttcatagcaactgctgaaatcccagctctacagagcgatggtgtcacacagatgggactgtggcagaaactaaggttgagactgaactcgctcgagctagtcgtttgctcagtgtctgacaggtgttaattactgctacgttctgtttaaaagtttgaactaggctgcggtgccccagggtgccgtgatgtacagtttgggagccaggggagggataggaacaggtgggaatcgtgaggaagggctctgagtcgagtctggcgtggccacctggctcagcccctcagctgtgtgaactgggacctgtgtggttgggggatagcaggtagcgtgaggacccctggaggtccacatctgcacgcccgtaagcgctctgcacacggccatacagtcacttgcatctggctgcagactccgactctgccctttggtaacggctgtagaggggatgataggagctgacctaggacgcttggggggattcagtgctggagtttcctgtgcagagagccccgacctctttctgcccccagggactgctactacgacaactccaccacttgtcccaagtgtgcccggctcagcctgaggaagcagtcgctcttccaggagccaggtcccgatgtggaggcctagcgccgaggaacagtgctgggcaccccgcctggcccgccaggacccaccctgccaacatcaagttgttccttctgctccggagacccctggggtgcggccctggccccctccacccctgctgggccagagcgggtgggcagtgtcaaggcccgctgtctcccaggtgcttgctgggactcggggcggctgcacctggctgtcacctgggtgtgctgctgtgaggggtccttgcgtggcccccatccttcccccaatgcagaactccatgggcagggagctggggggacatctcacctcccccatggcacagagccctccacacccctggaccagggcatccgggccctagaaattccacagctcccgtcctggccaccctggaagctcatcaggccaagacccggacagagcttcagaggagtgttgagtgacacctgaggatgcggctgcacacactcagccaagggccgagtctcacctgcggtggggtttcggctctgcctgggggctccatccctttcagccactcgtggccttggggatttctggttgtccccagctgggactgttcacagttgtcacctgcagacctgcctctccctggcctgaggttcaaaggcctcatcggatggtcagtacagtggggtcacctgttgtttctatacaacagcagggaaggggccatggagcttttccctgctgggtgctcctgctttggcccagcccacctttcctggtgctccaagctaggaggctgtggccccagcctgaggagggtgtcctggcctccaggtgtgcagcaggggctgtgtgctgggggaggttccagttaggcgatgggatcctgcagtggtctggtggcatttcttggaaccagatttacctgaggagctctgtcctgctccctgtggagggctccagatagctcagaaatgaccagccaatggccttttgtttgggggcctgaggtcaagagagctgagagtattcgctcgactgagcacattcaggaagatcagggcaggcgtgtgggaggtccctcactccacgggacagaggcccctggacagcagaggaaacctacagctctgggtgaggggacacttggctttggtgtttgcactttacagatcctgcggtccacgaggggcctcaggagaggacgtgtcaggacgtggcttcccagccttctgccttgggcagtgggggtgctcctgtctgtccttttcccccacaccctggactgtgcttggctgttggtgcacatggttggcacacggtgggcagagggcagagaatgccactgcttggttattggtcccctttgaccaggaaacccaagaggagacacctcagtcagcagaaaggccacctggctcactggctcattccaggagtgggagagacggcagggtctcctctttgtcctccggcatcaggaaggggatggtgtccactccccactgtggtggctttaggcaaggttcttattgtctgctctgcctcggtttccccatctggaaaatgggggcaggggtcctgacctacctcaggtggaacggtgagcagggaacatgtcggagtccttcagagaatgtgatgtgaggttggatcaacagtgtgggttcctgtcctgtttccccttcctctttggggctgaggaggaggttaaaggccaaatgctgtttcccaacaccccaaagtctgcacacgtctcatgaatgcatcacatttctgtcatatggatattagccattccgaaatctgtgtaatcaacttcacattattcaagttacaaatcactgtgtccatagaaaaactgtgctggtatttgctggacaaagggttgggccccttttatttttacctgccacccagcatctcccccacctgccccttctgggtgacacagccggtaaacggaatcacgtatggttctttctgtgggtctgtggcacagcaggaagagcccggtgccgccagcaccttgtggaagaccacacatgggtggtcccacagcatgggaccaggctggcctgagggatgcccagttgtaacaatgctgctgtcactgtctcattaaatatacatcctttagcctggtgtgtgtgtggtgaattgcggacaaagtaagagaaattggtctgttgacatacaagtcatttgcaggcttaggaaagacagcctttgccatccaatggggttgaatgtaatctggtgtgaggcgaagtaacatgtcctgattggttgggagaactacctgtggtatcacacagacgtgttgaacgtctctgggcccaagctgttctccggcctccgcctcccgggcccaagctgttctccggcctccgcctcccgggcccaagctgttctccggcctctgtctcctgagtagctgggactacaggtgcatgccaccatgcccagctaattttttgaatttttattagagacagggttttaccatgttggctaggctggtctcaaactcctgacctcaggtgatcctcctgcctcggcctcccaaagtgctggcattacaggtgtgagccacggcgcctggccaggcattgatttttcttagtgtccgatgtccttccagaaggacattcccaccagcagtgtatgacagtgcccattacctatagcctcgacagcagattgtgttgtcatacctttcaatgcagtgtgagaaatgtatctctgtcattttaatttgcatttctctaatcatgagtgaggtcaaacttttcatatgtttcaggatctgtttatgaattatgtgcccattttttcgattgggttcttggtattttttcttcttaatctgagtttctcacatattgggaatattaacctgttatttgtgagatggaaatattttctttgtgaattgccatttgactttgtgttattttctttcctatggcaaagttttactttgcttacatttttatatggtcacattgattaatatttatttcatctaggttttaatgtctggaagggctagtctcccctttgcaatttttcttttccttttttttttttttttgagatggagtctcgttctgttgcccaggctggagtgcagtggtgtgatctcggctcactgcaagttctgcctcccaggttcatgccattcttctgcctcagcctctgagtagctgggactacaggcgcctgccaccatgcccggctaattttttttgtattttttagtagagacgtgtttcacctcgttagccaggacggtcttgatctcctgacctcatgatctgcctgccttgacctcccaaagtgctgggactacaggtgtgagccaccgtgcctggccatttttttgtatatttttagtagagatggggtttcaccatgttagccaggatggtcttgatctcctgaccttgtgatcctcctgcctcagcctcccaaagtgctggtattacaggcgtgagccaccgtgcccggcctcaatttttcttttttaaaaaacgtcttctgctgggcatggtggttcacacttttaatccctgcacttttggaggtccaggctagaggatcatttgagcctgggagttccagaccagcctgggcaacacacagactccttctctaccaaaataattagctggtggtggtggcatgtgcctgtagtcccaacactccagaggctgaggtatgaggattgcttgaactttggaggtcgaggctacagtgaaccaagattgtgccactgcactccagcttggatgatggagcgagaccgtctcaaagaaaaaaagttttcctggcgattcttacacatatatgagcttttaaaagcatatatttaaataacattttaatgacaaaatttgatgctctcaagtatcaaaatggaaataccaacagcaaggtttccagggatgtccaacaccacagagcagggaggcctggctgggcctccactgttgaggtcatcatggtgcttccgctttattctgattaacttttggttacacacattgaaaaatgacctaagagagttgttttgagtggcgctttttctcattgtacagctcctgctagcagtttactgcaacactgatttctctggaacctctcagtttccagtcatcattagggctgttactagcaaggacctacaagccagcctcaaaatgtgagagggctgccgacagtcttcctgtggttagctgccacagtgcccagggaccatcttccctctcctcctcccccactgccagctcctgttccagccgcatcagttcctcatttgagagatcttcttcatgggactgcagcaactggtccacagcagcctcagcaacctcttcaaaggccacatttctggcaagggtcacaatgtttttttgaagctgtgcaatgttatctgcctgggaaaaacgctgggcctgaacacactcaggccaaatcttcttccacatgctgttcattagtgctggtttgagctcctcccatgcgatggccatgtccacagcatccatgatgctgtagtttctccaaaattccctgatcatagctgtgtcctcaccatccgctgcttctaggatgtgctgaaaagtccttctcagataatgagctttcaaggtcgagattacaccttgacacgtggtccggattgagtcagctgtactgtcatgaaggtattatactcttgtacttcttttttttcttttttttttttgagacggagtttcactcctgttgtccaggatggagtgcaatggcgcgatctcggctcaccacaacctccgcctcccaggttcaagcaattctcctgctttagcctcccgagtagctgggattacaggcctgcaccaccacgcccggctaaatttgtatttttagtagagacggggtttctccatgttgaggctggtctcgaactcctgacctcaggtgatccgcccgtctcggcctcccaaagtgctgggattacaggcgtgagccaccgcgcctggcctgaaggtattctactcttagttatcagaaaggtcgctcaaatttacagagtggcatgacgcactgtctagtatgagcagtgctttgttggtgagattattttgggcactgtatttttcaacggcaaaaaaagtaagtgaaccattcatgaaagatgctcctggtcacccaagcctttctgttggagcgccaaatcacgggcaaactgggcttcaagaacccttcagagccttgcgggtttctgagcggtacaccagtaagggcttcaacttaaagtccccagctgcactgccaccaagcagcagcatcaagcgatctttggatgacttaaaccctggctcagcattctcttcctcggaaataaacgttcctttgggcattctcttccaatcaagtctcgtctcatctacgttaaagacacctggggggtgtactcaccttcttcgatgatgcttttcagcatttctatgtacatgtccttgttgctgggagctgcgctgttcatcttgaagtggggcaaacagtggcactccttgaatctcacaagccacccttgacttgcatgaaacctctccgtttgagaaccttcgccatgttcacgctgtaagtcatcaaactcagccttctcctgaacgatggcggcgctcaaggtcgcatttggctggctctggtcttccagccacaagctcagcagctgctccatgctctccatcactgcacttcgatggcgagtcaaccgagaggctctcagaggagtagctatttgtgaactcgctttgattttttctttactatctcgaatggtcgccactgtagagatagcaagatctaaggcctttgcgatctgactgagcttctcacccgcttcaaatcgtcgtaacacttccaatttgaggtcaagggtaatcgctttccgttcccttttggcactagggatgacagttgcatctgtgggcctttccccaggcatttctgcctccaaaatgtcagaaaatcacagcggtctcaagcgcaagaacgctgtggttcctctacgtccccttgcagaactcggtcaacagaaaacgaggctgcgaagaggctcaggctgatgtcctggagacgtggacgggtccccatgggcaggcccagccccactgcctagcccagctgctgcttcactgtccactccgaggaggccgcgcgggtctcccggtaccgctcgaagtccgcgtgttggggccgtgcggccgcaggcacatacaagcggcctgggtcctggggctccagagaacaaccgaccaagcagacaaacggaactccgtgagggggacactgcggcagaaacgtccaggggcggttttccagtgcagcggagggcggaccgggcgggtgttgtttcgggagctgctttccatggaggaccccagaaataagtgttgatgcagatgcccgatttaagataagtctaaaggcgctggctatccccttagggcccagctgtctgggcagggcgaggctgcgctggcgatcaaaccctcgaacggtcaggcgacggcgtggacacccaagacggggccccagccggcgccgcgcccctgccgcgcctgcgcgagtcctccctgcgctcgcggggccctaggaccgctctcccattgcgcatgcgcgcgcccgggcggcgcgggatctgggtctggggatgtggtaccggctgctggcggcggccggcagtagagcggtggccaggccgctggccttgctgtggcgatgtggtggcccaggaggcggcaggacggccaagaccagcgcgagggccctgggcaaggcccgacaggtgagcggggaggcgctctccgccggtgccgggcggctggtctgctctggacgccgcgtgacgccattcgcctgcgccggccgcgggggagcgcgggagggcggcggccctgacctggtccgcgcagtgaggccgacagcacctggccagagcttcccgccccccgcctcctccgtctccaaactcctgctcttctcctcgctacctcttccacccacttcttgcggaattcccgctgtttactggatgcccggtccgctcggacatcggaaccgcgacctccagcctccttgctcggctttgtaaagcgccgggcgttgagcgatttgcgcttgagtcccacctcctcgcgaaccagctttgtggccccgcgtgccagcccgtgtcctcctgggctcggcggcgttcggctttatccacctcgcagttactcagtgaaccagacacgataagaggcgtgaaagggttttgcaaactgttctttatacagcgaccagtcactgtcgttaacagctaatgctgagagctaagggctttacgcggattatctaagtcttatacccgccctataggtagatatcgctataaccctattgttatttattatattatttttaaaaatttgggagcggggccggagtctcgctgtgttgtctaggctgatctcgaactcatgggcacaagcgattctcctttctcaacctctggagtagctgggactacaggcttgagccaccgtgccctgctcataaccctgttttatagggttagggtctaagaccggaatattctgtattttaagattgctttatttttgtattgatacatcccagtgagcagcagtaacgttgaattgtttttctaatgcagagtttttgaattttgatcccagaaagctgtcatggttttcagacagcagtaaaataagaagaaggatcccatgagtatttctgtcctgtcttcaggaatgaactccccgccccccgccatctccattcatttgggaaagtgtatgatggtttagttgctagcaatatgagtgaaagcagtctttcagctttggccatgtggcatcagcattgcagaggtcctcctggttgctaacacatattgaaagtcagcgatatgcaatatcggtgtgtacagcctaatatagcccaggagagttttgaatcattgaactgctatagacccctttatgaagggaggacggacgttgaatgatctttgagttccttcccggactggatcattcatctgcttctcatttattagagatagatctgttaatcatttaccagggaatatcttggtgaacacgacaggcaagggctctgccccactggcttgctctcttttgagagctttatgacttgtggactgagggtgacatgcagaggttggagaggtggcagcaatttgcattttttttttttttttgagacggagtttccctcttgcccatgctggagtgcaatggcgcaatcttggctcactgcaacctccggctcccaggttcaaagcgattctcctgcctcagcctcccgagaagctgggattacaggcgcataccaccattcccggctaattttgtatttttagtagagacggctgggcacgatggctcacgcctgtaatcccagcactttgggaggctgaggcgggcagatcacctaaggtggggagttcgagaccagcctgactgatgtggagaaaccccgtctctactaaaatacaaaattagcccggtgtggtggcacgcacctgtaatcccagctacttgggaggctgaggcaggagaatcgcttagaacctgggaggcggaggtggcagtgagccaaggtcgcaccattgcactccagcctgggagtgagactctgtctcaaaaaaaaaaaaaacgaaacaaaacaaaaaacaccctaacagctctcctcatggaagcttatgctgtggaggcttccatgcagtcatctttcattcattgagctacctactctgtccttgttctcgtagagtttacgtgctgtgcaaggaggaaccagacaatggataagcaagtattaggcatgttaggaaaaggaagcagaataaaggaaatagaaaatgaagaaagggaatggaggagggataaaccctgttatttgttgtgtcccctgcaggaagtgagggattgagatgagcttgctaggaagatggaatagaaaatgcactgccctagggtgggtccagccttgagttctgtgtgatcagtatgaggaagaggttagtgatagacaggtcaaggaggggcagggcctcataggcctgctgacgttgcacctgtgtgctgtgtgtgtctgtgggacccggaataagggtcaactcatttatggcctgactggaaagaggacagcagcacttggccctgtttaagggagtttgtgttttgcctaccttcacatcttggctttacatatacaaaaactaatttagcaaggttatttactgtgagctgtgaactgacttgcagaaaactccaagaaggaatggtaaactcctatcttagtgtttacatttactgtgagaactgcatcaggcttaaccagattgtctcctaaccaaatcacaaaaggactaaattgcgaattaaagcaaaggaattggatgttttatcaagttttggaagcctgaagagtcatactttgtaccttcagggctgtaggctacctggtatctacccagccaccagtaccagtgccacactgtctttgaggtggtcctggggtagtcatggaaaagctctggaagattggggcatcagaattctcattgcacactttcagctaccagctgtcttcaggcactcacattacctctcaggttctactttctcagatgggcaatggggatcaagtgaggtaagaggcacctggcaccctacaacgtgcagtatggccaccttctgttgtttgtgtaggtctcctgttgacccacaccttgggttccaaacccccatcggggaaacattcatgggatccttcgagagtcattgctagctctgtgtcaggtactgtgtgccattggtgctgggatggctgctgcagatcgatttcgttcacgatgtggaatcgtttgttagccccacagcctttactgtcagcattctctttctgagctgcttttttttttttttatgattttaataattttttcatagtatgtcttactttttagtctactgtggtctttttagggatatttgaataatgtagttaattagaaagttactaattggggaatgattttactttggggtagtagcctacagagtcagcctcccccgaatgttgacacagctgaaataacataggtgttgtcaactgtgggtcttgtttcattataataaaatattgggggctcacacctgtcatcccagcactttgggaggctgagacaggtggatcacctgaggtcaggagttcaagaccagcctgaccaatatggtgaaactctgtctctaataaaaatacaaaaattagccagtgtggtggtgtgcacctgtaatcccagctacttgggaggctgagatagggagaattgcttgaacccaggaggcggaggttgcagtgagctgagatggcgccactgtactccggcctgggtgacagagcaagactctgtctcaaaaaaataaaataaaatattggggacaatataaattcactggttatgttgggattttgttggatacagttagtactgggttattgagtgcttagattttgttttttaatatttgtgtatgtgtgtggtttttttttttttttttttttttgagagagtcttactgtcgctaggctggagtgcagtggcacgatcttggctcaatacaactttcgcctcccaggttcaagcaattctcctgactcagcctcccgagtaattgggattacaggcgcccacctccatgcccggctaatttttgtatttttagtacagacggggtttcaccatgttagccaggctggtctcgaactcctgacctcaagtgatcctcccgcctcggcctcccaaagtgctgagattacaggcatgagccacagcacctggccgacgttttcctccttgaagactgaagaaaatacagagcttctggaaaaattatttgttttcttggcctgacaaaaacttttacctcttgctggatgctgtattacctgtctgttgtccctgctgtgaatagccactgcactccaatgagaccccatcttgaaaaaaaaaaaaaaggctgggctcatgcctgtcatcccagcacttcgggaggccagaacgggcagatcacctgaggttgggagttcgagaccagcctaatcaacacggtgaaaccccatctctaccaaaaatataaaattagctgggcgtgatggtgggtgcttgtagtcccagctactggggaggctgaggcaggagaatggcatgaacccaggaggcagaggttgcagtgagccgagatcacaccactgcactccatcctgggcgacagcaaaactctgtctcaaaaaaaaaaaaaaagaaaagaaattaagctcttggtcgaccaaagatgagtcatagtgtatttcagtatttaaattttacacaattttatgttttagtcttacagtcttgtttttgaagctgcaatatttcaagttactaaataaattgcctcagtttctaagccgtgttttttgttttttgggggagttttttcttgctgttggaggctatagctataaacatttgcagtgcatttctgcagtgagcttgctcctgtttactctattgaatcatatttctaatggggtatttaaggcgataagctcacacctcaccctgcttgctccagtggttatggccagtgagaatgtgcggtgttgcattgcagaagaagctaggaaagctcatctggcctcctgttccagtgcttccaggggatccacgttcagaagctgactctgcaggcaagaccgacgttattttcctggtggctgtgttcaaaaccacccaaaggtacctgtctttcatccaccatcattaacagcatgaggtttacaggaactgagtggcttcctcagagtgtgacttctacagtgagtgaccagggggcgagggtccagacaactcagggcacaccccactccaccccgccccatcctaccccttcctggcttccatatcgagccacacaacatccagcaccttctccatgtctttatggtgttgatatctcactaaagctggtgagagaaaagctctttccaaaggaaggtgcta

SEQ ID NO: 2216 - DNA, 887 bp, Homo sapiens
cggggcggccgggcggatccagcgcagccgggagacagatgcgaggcggcggtcaggtgccgaacccacggccaggcttccgtggccagcagccctagaggaatggccatcctgtccctgcgagcccctgggccctggcaggcgatgcaggtgggatgctatggaatatgatgagaagctggcccgtttccggcaggcccacctcaaccccttcaacaagcagtctgggccgagacagcatgagcagggccctggggaggaggtcccggacgtcactcctgaagaggccctgcctgagctgccccctggggagccggaattccgctgccctgaacgcgtgatggatctcggcctgtctgaggaccacttctcccgccctgtgggtctgttcctggcctctgacgtccagcagctgcggcaggcgatcgaggagtgcaagcaggtgattctggagctgcccgagcagtcggagaagcagaaggatgccgtggtgcgactcatccacctccggctgaagctccaggagctgaaggaccccaatgaggatgagccaaacatccgagtgctccttgagcaccgcttttacaaggagaagagcaagagcgtcaagcagacctgtgacaagtgtaacaccatcatctgggggctcattcagacctggtacacctgcacaggtgggccgagacccagacgaggagtgaggaatgagagagaccaaagttcctgcctccgctgggctcacattcagatgtgagctatccagtgtggtggccactagccaaacatggccagtcaaagttaaattaactaaatatgcatttcctcgttgtactgtctacattggacagggctgttctggatgagaaattaaactagtgaattacatg

SEQ ID NO: 2217 - protein, 195 aa, Homo sapiens
MEYDEKLARFRQAHLNPFNKQSGPRQHEQGPGEEVPDVTPEEALPELPPGEPEFRCPERVMDLGLSEDHFSRPVGLFLASDVQQLRQAIEECKQVILPEQSEKQKDAVVRLIHLRLKLQELKDPNEDEPNIRVLLEHRFYKEKSKSVKQTCDKCNTIIWGLIQTWYTCTGGPRPRRGVRNERDQSSCLRWAHIQM

SEQ ID NO: 2218 - DNA, 831 bp, Homo sapiens
gtgccgaacccacggccaggcttccgtggccagcagccctagaggaatggccatcctgtccctgcgagcccctgggccctggcaggcgatgcaggtgggatgctatggaatatgatgagaagctggcccgtttccggcaggcccacctcaaccccttcaacaagcagtctgggccgagacagcatgagcagggccctggggaggaggtcccggacgtcactcctgaagaggccctgcctgagctgccccctggggagccggaattccgctgccctgaacgcgtgatggatctcggcctgtctgaggaccacttctcccgccctgtgggtctgttcctggcctctgacgtccagcagctgcggcaggcgatcgaggagtgcaagcaggtgattctggagctgcccgagcagtcggagaagcagaaggatgccgtggtgcgactcatccacctccggctgaagctccaggagctgaaggaccccaatgaggatgagccaaacatccgagtgctccttgagcaccgcttttacaaggagaagagcaagagcgtcaagcagacctgtgacaagtgtaacaccatcatctgggggctcattcagacctggtacacctgcacaggtgggccgagacccagacgaggagtgaggaatgagagagaccaaagttcctgcctccgctgggctcacattcagatgtgagctatccagtgtggtggccactagccaaacatggccagtcaaagttaaattaactaaatatgcatttcctcgttgtactgtctacattggacagggctgttctggatgagaaattaaactagtgaattacatg

SEQ ID NO: 2219 - protein, 195 aa, Homo sapiens; identical to SEQ ID NO: 2217

SEQ ID NO: 2220 - DNA, 4054 bp, Homo sapiens
ggcacctgcacacggtggttctctgttcctttttcctcctcaaccactgaggttaaaaaaagtgttaaaagccaccctttttgtttttttgagacggagtctcgctctgtcgcccaggctggagtgcagtggtgcgatctcggctcactccgagctccgcctcccgggttcacgccgttctcccgcctcagcctcccgcgtagctgggactacaggcgcccgccaccgcgcccggctaatttttcgtatttttagtggagacggggtttcaccgtgttagccaggatggtctcgatctcctgacctcgcgatccgcccgcctcggcctcccgaagcgctgggatgacaggcgtgagccgccgcgcccgcccattttttttaaacgtgttggggtttgggtttcagccacaggccttctgcgatgagaggaaacccaggacgcgcagccccaggtcaggcccgcggaacagccgggcggactccggggctcgcagactcgcgacccgcgtgccatgaacctccgcgccggaggcggcagcagcgagcgcggggctggatccagcgtagcggggcggccgggcggatccagcgcagccgggagacagatgcgaggcggcggtcagcaggtgccgaacccacggccaggcttccgtggccagcagccctagaggaatggccatcctgtccctgcgagcccctgggccctggcaggcgatgcaggtgggatgctatggaatatgatgagaagctggcccgtttccggcaggcccacctcaaccccttcaacaagcagtctgggccgagacagcatgagcagggccctggggaggaggtcccggacgtcactcctgaagaggccctgcctgagctgccccctggggagccggaattccgctgccctgaacgcgtgatggatctcggcctgtctgaggaccacttctcccgccctgtgctgcggcaggcgatcgaggagtgcaagcaggtgattctggagctgcccgagcagtcggagaagcagaaggatgccgtggagaagagcaagagcgtcaagcagacctgtgacaagtgtaacaccatcatctgggggctcattcagacctggtacacctgcacagggtgttattaccgctgtcacagtaagtgcttgaacctcatctccaagccctgtgtgagctccaaagtcagccaccaagctgaatacgaactgaacatctgccctgagacagggctggacagccaggattaccgctgtgccgagtgccgggcgcccatctctctgcggggtgtgcccagtgaggccaggcagtgcgactacaccggccagtactactgcagccactgccactggaacgacctggctgtgatccctgcacgcgttgtacacaactgggactttgagcctcgaaaggtttctcgctgcagcatgcgctacctggcgctgatggtgtctcggcccgtactcaggctccgggagatcaaccctctgctgttcagctacgtggaggagctggtggagattcgcaagctgcgccaggacatcctgctcatgaagccgtacttcatcacctgcagggaggccatggaggctcgtctgctgctgcagctccaggatcggcagcattttgtggagaacgacgagatgtactctgtccaggacctcctggacgtgcatgccggccgcctgggctgctcgctcaccgagatccacacgctcttcgccaagcacatcaagctggactgcgagcggtgccaggccaagggcttcgtgtgtgagctctgcagagagggcgacgtgctgttcccgttcgacagccacacgtctgtgtgcgccgactgctccgcggtcttccacagggactgctactacgacaactccaccacttgtcccaagtgtgcccggctcagcctgaggaagcagtcgctcttccaggagccaggtcccgatgtggaggcctagcgccgaggaacagtgctgggcaccccgcctggcccgccaggacccaccctgccaacatcaagttgttccttctgctccggagacccctggggtgcggccctggccccctccacccctgctgggccagagcgggtgggcagtgtcaaggcccgctgtctcccaggtgcttgctgggactcggggcggctgcacctggctgtcacctgggtgtgctgctgtgaggggtccttgcgtggcccccatccttcccccaatgcagaactccatgggcagggagctggggggacatctcacctcccccatggcacagagccctccacacccctggaccagggcatccgggccctagaaattccacagctcccgtcctggccaccctggaagctcatcaggccaagacccggacagagcttcagaggagtgttgagtgacacctgaggatgcggctgcacacactcagccaagggccgagtctcacctgcggtggggtttcggctctgcctgggggctccatccctttcagccactcgtggccttggggatttctggttgtccccagctgggactgttcacagttgtcacctgcagacctgcctctccctggcctgaggttcaaaggcctcatcggatggtcagtacagtggggtcacctgttgtttctatacaacagcagggaaggggccatggagcttttccctgctgggtgctcctgctttggcccagcccacctttcctggtgctccaagctaggaggctgtggccccagcctgaggagggtgtcctggcctccaggtgtgcagcaggggctgtgtgctgggggaggttccagttaggcgatgggatcctgcagtggtctggtggcatttcttggaaccagatttacctgaggagctctgtcctgctccctgtggagggctccagatagctcagaaatgaccagccaatggccttttgtttgggggcctgaggtcaagagagctgagagtattcgctcgactgagcacattcaggaagatcagggcaggcgtgtgggaggtccctcactccacgggacagaggcccctggacagcagaggaaacctacagctctgggtgaggggacacttggctttggtgtttgcactttacagatcctgcggtccacgaggggcctcaggagaggacgtgtcaggacgtggcttcccagccttctgccttgggcagtgggggtgctcctgtctgtccttttcccccacaccctggactgtgcttggctgttggtgcacatggttggcacacggtgggcagagggcagagaatgccactgcttggttattggtcccctttgaccaggaaacccaagaggagacacctcagtcagcagaaaggccacctggctcactggctcattccaggagtgggagagacggcagggtctcctctttgtcctccggcatcaggaaggggatggtgtccactccccactgtggtggctttaggcaaggttcttattgtctgctctgcctcggtttccccatctggaaaatgggggcaggggtcctgacctacctcaggtggaacggtgagcagggaacatgtcggagtccttcagagaatgtgatgtgaggttggatcaacagtgtgggttcctgtcctgtttccccttcctctttggggctgaggaggaggttaaaggccaaatgctgtttcccaacaccccaaagtctgcacacgtctcatgaatgcatcacatttctgtcatatggatattagccattccgaaatctgtgtaatcaacttcacattattcaagttacaaatcactgtgtccatagaaaaactgtgctggtatttgctggacaaagggttgggccccttttatttttacctgccacccagcatctcccccacctgccccttctgggtgacacagccggtaaacggaatcacgtatggttctttctgtgggtctgtggcacagcaggaagagcccggtgccgccagcaccttgtggaagaccacacatgggtggtcccacagcatgggaccaggctggcctgagggatgcccagttgtaacaatgctgctgtcactgtctcattaaatatacatccttta

SEQ ID NO: 2221 - protein, 505 aa, Homo sapiens
MRGNPGRAAPGQRTAGRTPGLADSRPACHEPPRRRRQQRRWIQRSGAAGRIQRSRETDARRRSAGAEPTARLPWPAALEEWPSCPCEPLGPGRRCRWDAMEYDEKLARFRQAHLNPFNKQSGPRQHEQGPGEEVPDVTPEEALPELPPGEPEFRCPERVMDLGLSEDHFSRPVLRQAIEECKQVILPEQSEKQKDAVEKSKSVKQTCDKCNTIIWGLIQTWYTCTGCYYRCHSKCLNLISKPCVSSKVSHQAEYELNICPETGLDSQDYRCAECRAPISLRGVPSEARQCDYTGQYYCSHCHWNDLAVIPARVVHNWDFEPRKVSRCSMRYLALMVSRPVLRLREINPLLFSYVEELVEIRKLRQDILLMKPYFITCREAMEARLLLQLQDRQHFVENDEMYSVQDLLDVHAGRLGCSLTEIHTLFAKHIKLDCERCQAKGFVCELCREGDVLFPFDSHTSVCADCSAVFHRDCYYDNSTTCPKCARLSLRKQSLFQEPGPDVEA

SEQ ID NO: 2222 - DNA, 37944 bp, Mus musculus
tctccaactccttcaagggagagacgggcagaagtcctgatgtttgctagctagccagactatctaaaacagcaagctctaggttcacgagagaccctgtctcaaacattcggtggagggatcatcgaggtgactcagcagacaaaggtgcctgccactaagcctgatgacctgcgtataatccctggaacctaccagctggaagaagagaatcgtcttctgcaagttgtcccctgacctgcacatacatgcgtgcatgcgtgtgctcctacacacacaaacaacacgtcaacataaaaggtagagagtaatagaggaagactcctggtgctgacatctggactcggaacgagtgtgcccactggcacatacacactcactcacacctgccccaatgcaataagaataaatcagttacatgggaatgacgtctgtccacagtcagtgcacagccatgtacgaactcaaagaatgtcggtgtgtggaaaggggagggggagagtgagtggcagccaggtgtgacaacccatacctgtcctgtcatcttagctcttagaaggtggaggggctcaaggctagcctcagtgactatcattcaaagccagctttagttaggcaataccttgtttctggtttttgggtttaaaagcaagtaaacaagaaagaaagccccgtaagtgggtgaggcttagcctagggtagtggatcaaccctataatctcattgttctaaagactgaagcaggaggatcaccatgactggaagatacacagtgagttccaggccagcctggggtacagtgtaagactgtctcaacaaaacaaagcaataagaatctgtgaatggttatgcaggatttagacacaaagcctgccttcttgctacaccttgtggtgcatacataccctggaggctgaggcaggaggattatacattaagaccagcctgggcaatttagtaaggaagttatctcaaaacaaaaattaaagtcttagaatggctcagtgttagaacccttgcctaacatttggaaagtcccaggttcaaacccagtaagggaagtgggaagatttgctctccttcagaaagttgcttccaaggagaacatggactcttcatctctggtgcatttcctttagtgactggcactaaacattcactattggcattgcagattgttgtctaaattctagaagtctcagcccacacagaagaaactccggaacatgacttctaacctcacttctataggagctcagagatccccaaaacttctatttacaggaaaatgccagtccacccaaaggcttgtgtctgatttccagagttctccgccagagcactctttgatctgtgagtcactgttactggcacaagctgggaaaaggtaaaggaggcataggggagggtttgtgccctagggaaggctgcctgggctctgcccccggggccaggaagccaaggttggcccaacccaaggtcttgagtttgaaagctgtgttggttagcttcatggatggagaggagtcagatctgggctcaaggtctcatgccccccccccacacacacacacacgtttcatagcgcgaccctgggcacacgccttcagttcttcgagcttctacatccttacctattagacgagcaattctacctgcacctggggatttacaagaattgagagagaaaatgaaggctggcaagatggctcagcgggtaaaggcattgtcaccaagcctggcaacctgagtttgatctctaggacacacagtaggagagggctgactcccagtgctttcctctgacctctgtgctcttactgtgcacacacacacacacacacacacacacacaccaaatgtaataagcaaatttaaaaagcaaaataataaagtgaatctatcttccaggctcactgtttagcagagtgtaaatcctagcatgatttgtcgctgtcttattttaatacatggaatatttagagggggtgatttggaattccaagtaggacacacacactcacacacaaacaaacacaccacacacttttatacacacacagcgggagtttggcactgtggcacacaactgtaatcctagcacttgggagatagagatgtcataagttcaaagtcattattagctacatgataaattcaaacaagcctgatacaagaatgaggaacaggggaaggggagttggggtggggctacaatcccagcttccaagaaacagaagtgggagatacaaggtaaggccagcctagtctataaagtcagaccctgtatctaaagaaaagcacacagtctacatcaacgcggggacatatgtgtttgaattaatattaaagtcaagcatggtggttcataactgtaatcctagtgtttggtaggaaaggtggaagtaggagggtctttctaagtctgggggctacggaatgagttccacgtcagcctggcttagagtgagatcctgtccaaaaaaaaaaaaaaaaaaagaggaggaagggaaggaagaaaggaaggatgggggaaggaacaagttgaaaagagaaagaatattgagaaaagcagagcagaaaatatagagctggcagtgttaatttccttaaagctacaaagttcagaagataatttgaagtaaatatttgtcaggtattattttctctcaaatgacctaaaatcattatacacatttaaaaaaaaaaaaaaactttattactgttagtgttggggtggggctgttgcatgcaagtcatggccgagtgtgggggatcagaaggcgactttcaggaggagtcagtgtcaccttacaccgctcaggctgtctggcttgtgcagcccatttgccttgctgaacctccttgactgccagtattttttttaggggtctgaataggcagaacacagagggtttgggaagcaaaaccatgtggtagtgtaatgatgccttccgcaaaccccacaaaatgtatgctgagagcggctgtaatggaagccgtggacttccagtgataagggcatgtcaacacaggctcattcactagcgctcagccagggaggtttgcgcaatcgcaatggggagggcggttggggcagggggccactctacccatgtggatgcagaaggactcttaaaaaaacataaagtcaatttgtaaaatgttctgggttttggtggcattaaggaggtggaggaaccttatcaggagtaaaggaagagagagagagaggaaagaaggaagaacagagggggaaaggatggggtgtggggggaaaggagggagggagggaaggagggagggagggagggagggagggagtacctgagaaactgaggtaggaggactctgctgcaaactgagagccagcctgggatgcttgaaacattgtctctcagaaaaagaaggaagaagaggaagagaaaaagataaagatagccagaagtggttttgcagtgactgatttgggaaagggtgctccttcctatcaaaggaggaagtgggccctcatctgtcctctctgtgtcaaaaccttaaagttgagccccagtgatagcatcaatcagatggcagctggagattccaagacccaaggacccatggttgctgcaagaggaagaagacacatagatggcacctctccaggcctggccggctcatgctgcgacctctggtaaaaagacaggtcctctctcccaagataggacctgttcatggattttgcaggagcagtaaaactagcctaaaactccacatgcttttttttttaaataaattaaataaataaacaaataaatatcctcagggcttcattgtgaagtgtactggcacactgaaaatgtcacagcatgcagggtgcccacaccctttgccagatcgatcctccggcatcgggaggacttgttgaaggtccctgctggcgctctgaacatgtgtggagcagaggacgtgacctttctattaggactctgataagtgtcctggtaatggggatggttggggtacaaaggacaggataggatggtctcagaggacacctgtgtcaccagtggttcacagaatattctgtttcttagacactggagacactgttatcctaaacacctttctcctcaataaaagaacattcaaaaaataaataaataaggtagcctgagatcttctgttatgatgaggtgcccaacttgcccttggaggagtccattctctgagaactctgtgacccatcaatattctgagggcagacatgggggcttctctcacccatagttcaatgtcagacacacagagctatggaaggcatcactcacttgctggacatgaatggggacagacagaggagccacatccaggacacatagacttggagggacaagaaggaagtgggaaccgtgtatgggcaaggacacagcccagcttcagggcaccaggtttcctatctgagcgtgacaccagaagctggcctgaaaccctggatggtctgcaatcctgacacggaagcagagagggtgctgtggacttggactcctaacaaagtcatctcagagtttctccctgtgtggtgtccccccaagtgcctttggtagaagcaggcactgaccatgacccctccttcttactccccaccgcttcctacccctgaggctgaagcctgacacctctgcaccctttctgccccccccaccccccgccactaccttggtccaacccattatcacctcccattggatggctacagtccacctcccaggtatctaaatcacaagtctgatcatgtcaccccttgaacaacacctttctgtggccgcccactgttcttaggggggaagcaaacaccaaccatgggtactggcatttcccacaaggcccagcatttcttggcccctgcaacatgctactggatgatttggggcagctgccctcccacatcatgcctcagctacctggtgaagctcctggaagcctaccagactcagcaccagtacataagttgaattgctcactttgtgattggggcatcccctatgcccatcaatcccgatttatgggttttttaaagtctaagcaagatccagcagaactttctaaacagactttctggtccaggccagtctcctctggtttatggtaccagttgtaacaattatagagttttggttttgctgacatttttttttacataattttactctgtatttgcgcgtgcgtgtgtgcgtacatacttgcacgcgtgtgtgtgtgtgtgtgtgtgtgtgtgtgtgtgtgtgtgtgtgtgagagagagagagagagagagagagagagagagagagagagagtcccacagtgttcttgtagaggtcagataacagcttacaggaattctctccttccttcgtgtaagtgctaggatagaactcaggcttagaacttagtgcctttacccataagcccactgtaactttttaggtggctctggttctctcttgagctaaggagcttctgcactcgctgtgacctatcacctgcttgtagcacttcatagcacagggacgagctctcctggacaccagttgcctgcctgagggaagcagttcatggagaaactagcttacagggtgggcaggaccttcaggcgtcctcaggcttccggtctataagctgagagatctgcctttctgtatagctcagatcattcaagcctgaaagtcaccgaatcaggctggctcccctccatctggtttcccacctgagaatgaatggctgtccttgacattcagttatttctgttttcctccttctgcaatggctaccgttgctccggcctgtttcccaccacaccctcagtggacagaagtataatccggtgacaccataaacttagtttgcgcttctgctgaggcagtgaggtcgttggagctttgtagaaggtcttgagacagagaaaggactgagccacttccttctggattctccctcagactcgaggctcaggtggcttgtcctatcttcacgagcccaggaacagggttgtaatacaacccaaacacagccactgcagggagccagcaaggagaaacaaccttcctgtctccccatggacaagctgccttgccagcttgcccctctctccacacaggtcaccggttgagtttctctctcttctgtcctgtgggcacttgtttactggtgaagacagagacagcaggatgacacttccttcttgacagacttagtagagacccactcagtcagtccataagcaaagaacattgcctcctggagttttgctgctcaggtctgctatcaggattcagacagttacaacccaaaagactcgatccagctgtggacaaaaactactgttgagcgctgatgtagctgtatggtcataaggcaggaagtcatatgtagtcagatttagcacttaataagttgatcataataacttcccttccatgagccccgccttgctccaacccaaagatttatttattactgtatgtaagcacactgtagctgtcttcagatgcaccagaagaggacatcagatctcatgagtatgagccaccatgtggttggtgggatttgaactcaggaccttcggaggagcagtcagtgctcttaaccactgagccatcatctctccagccctacatttaattcttaaaacaaccctagaagaggctggagagatggctcagtggttaagagcctttatgtcagatggttcataacccccagtaacttcagctacaaggggatcagtacactactctccagaagggcattcacatcacctgtacacacccgtgcacagaccacacacatacacataattaaaaacaggaaaagtaaatctttaagtgagataagcacatatgcacccatttcccagctgaaggaagagactcagggaatcacacagctcaccctggccaggcgctagctctgagatctggataccctttctgagccactattgggaactcagagcttgcttccctcgggctagtgatgcagtaggggccagaaatccaagtatggcacaacacataaagataagacataaggactccctgacgtcgagggctgtttggttgcagtcagggtaattagggttgtgagaacttctccttccaaggctttttgagtccaagatgaatggatacccctatacttggatgacttatggaaggcaggcgactcccagcttggggctggcctgtttaaactgacagcctcttgcccacataaaccgttagatagcaggaaaagatagcatggggtgtgtgctcattcaggactggaagaaagtgaaggtctcagacaggcagatgcttctgaggttaagagcaaaggctttgtggttaggcagccttgcttcagccgctgctggctcaagacccggaggtaccgtacctctctaaatctgggctttttagccaataagaagaggctaagaagagaatgcacttgggagagttgttctgaaattaataagatcatatgtgtaagatgctccacagaccctggacctgacgctacagtgaagctgggtcggtaactaacgtatgcttatactcctcatactattggtaggctaaacagggagctcacgagtttaaagacagcctgggctacatacacagtgagaccttatctcaaagacaaaaccaaacccctaaaatgaatggtagctgtgtgattattcttgctgtagtgcagaggctgaggagaacagggcatataaaggtcggtaggtgactcagaaactcttgctgggaaacctggattttttttttctctccaatcttgaagacctggtacagtcaccagaaagaactagggccatggttgtggctcgtggaagaggcggcgtgttctctattgttttaaaagacagagcaggctggacagtagaggcacacaccattaatcccagccctcgggaggcagaggcagataggtctctgtggccggccagtttgagaagcctagccagggctacatagagtaaccctgtctcgaaaaacaaaacaaaaacaaacaaacaagaagagagattaggttgaaatggagaaggactattcacagggaagatgcatcttccatctgtgtttccaagccacaaagtctgaagagagaaatagagactcttcttggttcttgttggggactgggggttgggggaggtgggtatctttggactcgggggagggtccggggcctgggacagaaccagtgatgatggatgggacaggacccgaaacagaggaagttaggaaatttgggtgaggcccctaatgactatggaactgactcatgggggcactcccagctcgaaggcctctttgagatctagcatcctgtcaggcaagaggccagctctgagaccccaggcaattcggtgctgccagctcaggctctaagaccccaaggaaacaatccagttattgtctggcagcctgccccaactccccagagtgaggaaaagatactcctcgagccaggtgcttccccataaagatgctgtcaaggaccaagtgtctaccaacctctggcttatcaagcaccacactggaccttgttgccagggctgcctccctgtcctctcccagaaagtctgaacctataggcttaaggatcctggaagctgtgtcataatgaatatcaaagtgacagttgaagtagggcaaatttaggaagccccgagtgagatggaggacatctttttttaattctcatttttttattaggtattttcctcatttacattttcaatgctatcccaaaagtctcccataccctcccacccacccacccacccccactttttggccctggcattcccctgtactgggacatatgaagtttgcaagtccgatgggcctctctttccagtgatggccgactaggccatcttttgatacatatgcagctagagtcaagagctccgggggtactggttagttgataatgttgttccacctatagggttgcagatcccttcagctccttgggtactttctctagctgatggaggacatcttaagtccccttcagtcctatatgtgttccaaaggacgggctcatgctagttgggggtggatcatgtgctagagatcccctaggaaggaaagatgaagggggtggagtggggaggcacagtttcaaccatctgtcatcaagaccctagagaccacagggcacctggaacaaacagaagtggcaatggacaggagaaacaatggtcctggccatgcccagggggccttatctccagggacgcccaaccctctgtgttcactagcagacagttaggctcaaacaattttcaaagtatgcttgtgtgtcaccaaccagaggggaatcctgctccccaagtcttcactcagcttattggagtctctggcacagcaggagtgtctttttgtggcccttgattggtgcttccgttatcggaaagagcagaggccctgagcggtgggctgggctggagaaaggctgactgaacacaggagagaaaactgaataacggctcataaagtgttaggctccttgatggccgcatccagattggccgcctcacttacaaaaacagctcacacctgatggatgcacagatggccctcaacccctaattgcactccccgacctaggaaaagaccagaatgctaggtgaggcctgatttttttcccccagccgcttttgagaaattcgctgtgtcagagaaactaaaagactaagcaaaacctctgaaaacccaagcccgattatttcatccacgtggcaccagaacaagccagaggggtgtagggggcgggggagtcacccgtcccgcccttaatgggaggaagggatttgcccggagcgcaaactctggacaaggcccggccggtgacggggcgcggcgggagggagggatccagagaaagccagcctagaccacaaagcggctgagccccgtggtccccaatccccgcccctctctgggccactgcggtccctttaagggccaagaggtgcgcggtctctttaaggcaggtcctggtggtttctgttttctgaaggaagtgacggggggtgggattgaatgaaaagtgctgaacggagtccggagctcaggaatcggggcggctaggggacacgcacggggggcgccgtccgggactcggggtgcgtggctgtacgcggcccacgtgaattcgctgcacgtcgtggggaacctccgggttgagtctcccctctagaagtaggggactgccgggaatccccgaaccggacccccaacttcgagcaaactttgtaggcgcgtctcccctcccccacgcggcgcgccgggggccccggggatgcggccccctggctgccgcgacgtcccctcggcgcgccccgcgctgccgctgctgctgctgctgctgtcgccgctgctgcttggggcgctgcacggcgtgggcgcgggcagcggcgctccggccgagctgcgggtccgagtgagactgcccgacagccaggtgatcgaggagagtctacaggcggacagcgacgcggacagcatcagccttgatctgcgcaaacccgacggcactctcatctccttcatcgcggatttcaagaaggtgaggtaccatcaagagtcctgtcccacccaccacggagggcgggcaagctgtcgggcgtcccaggaaccctcaagcccgcagaagagaaacgcagtgccgaaaggggaacgtgacatgcccaaggtcacctctctaactcgctgcccactctctggcacccagatcccggtctttattctctttcgtgaacccctctagcttttttgttgcttggctctgagtaaccaaggcccttctcacgcactgaccggcttcaaagcccgctccctcctcagcactccaagctgacactccgacaaaagttcttgttaacaaggcctcctttcttgccactgcctctgtgactaaaggggaaatccacaggtggcaagaggaccttgggctctccctgttgtgttggtgtgaagttagtttcccttactccgctgttctttggcaaggaagcggtttcaagacctccagcctggagcaccattccgggatcgctttccctgcagagctgtctgcccttggtccctcccaagtctggtagcagctctcctctgtaacctgaagggctgaactacttgggagccagaggacctaggcagagttgggggaagggaggagagaaaaggggaggttcccctcagttggaaagggtggtcggtgtctccgcccatgcctgacaggggctggtgaagtccacagtttagctgcccccgtcccgtcccgtgtctctctctctctctctctctctctctctctctctctctctctctgtctctgtctctgtctctgtctctgtgtgggtgtggtggtatggagagaagaagagatgttagagttatccagaaatggaactccagggtgctgagtgacggtgacccaacaacagaaatctctgaaagaaaagacagtgaaatgccaccccagtcatcccaggagcctaagacaggaggaacacaagttcaaggctatacagagctacagagtgagaccttatctcatggttggggggaggagagtcttctaatcatccactctcagctcttccccctaaaaggaggcattgcacccctctgtctttgggagaggaacagaagtgacgaatatccaggactaaatagccatccctcctcttccctcctctcctctcccctcccctccattccaaaactgagagttatttggagaccttggagggagagggggcagaatttgggcagccagctagggatcctgtgagactgtcatgagcatcagaggtaccagggagatccagtgttgggtagagtagaggtgagcctggactgatgttctagcccaggcccagggagtcatcctgaccaaggacttagcagaatggtagcccgtgcttgccacacaggcccaaactgggttcttacatgcaaatagggccaatgagccagtgtgtggagaaggggaaactggtcactcagcacatccagccaaactttagggacattttatgtatggtgttctggacagagtcaatcaggagtgggtatctaatctcccctctaagcctctgacctaaaagccagtcacagaatgtgccgttagtgtcccacccacctgcccagttgttgtgatcaccctggaaccttaaaaaaagatttatccattcctaggctcgaagtctgatagccaagctgggtggggcatgaaaggctaggagtggagcagagcttttctagcctctggctacaaagggttgtgattgctctgctctgaaaggcgaccaggaaagaatgcaccagaggaaagcaccagagcctgcgatggggtggtggcctgccatggaggtgggagactagggattggactgagtatggggagggggacatctggttgctcagatggaggggacattcagagttgatggcaagtgctctttttaatccccatagtgactcaaacctttctcacccagttttccaaagtcgggtttgcaggttagcctttgacccagagctggcatttcacatctacccctggcagctccaatttcatgagggggggggcagtaaaggcacagaaagtagaaagccagctgtcagagcttctttggccctggccagggtggaatgggataaacagagactaggaggacaatgtttagtctatgccagcatgtcgcctctattggccagagccactctgtacctgtccttcccccatgctgcccatcgctcacttgtcaaggcctctaccctcaaagccttggttagttctgtatagaagtaatggtatttcctatagaaaacagcccagaagttgtgttttgtacaccacacccattagggactgctttaggggaaaaaaatcctgaatcttcttaggaccgtggatgcttgcaatctgatcaccactgaggaacacggtacaaagcgaaggaggcaagtctggttgcccgcccgtgagctggtccatccagctgtttaatctctctaggccttcatttcttcatctgtaaaatgggctagcattggcacctacccagaggccttgggcagagctgaacatggagcaaagcacttaggtatgccggctatgctgctggtgctttgtcaagtgctcaggaaaggaaggagcccttagctagctcggaggctggctcaccccacttctcagccagcctcctccctggtcagtttggattaaaaaggttgaagggtaagcaagagatcacaaagaaagtccacttagaactaagactagagtccctcactgcctcttgtcttcttcctgacttggaggcagggcctccaaataaagcccagactgaccttggccttaaactccctgtgtggtccaggttagtctgaaacttatgttttatcatcaatatttttacacagtctcactatgtggtgtgacaaaacttttcctgaggagatgctccacagaggtctactcaccccaaatagggagcctgtgacagaccaacataccaatagcaccaaagtccagcttggcaaaccatcttggcatatgaatgagctgttacttacaggagcaaaaatgactcaaagcagatgcatccatcaccaaggcccacccccaccttggtgaccactcacaaaagctgggaacctggagtatcctcacagcctgaaggcagctcatggggttggagagtgtcctttcgggatgcctcaattgttctaagcctctttcaggcagtttgtctggatttttcacaaagctaggctgagcatctttgaaacttagcttttattatttactcggaaaggagaggcctagtgattcaggtcagtttcagggacttctggaagctctttttgagttgtttaacttcctgcatcaggtacttccctgaaggatagaatgtttcaatctcccaagaaactgttaccctagtctagcctcttacctgactcagtctcaagtgataggaactcaggtgcgagagcctccactaacaaccacccttctggaagctgctgaatcaaaagctagtcagcccctccggggcagcagtcaactttggactaagtaaacctaagggcttcagagacacccttgagcagcagtggtcttagcccgtccacaacctcagccctgccttcttcccggatgtgtatccaagactgatagactgctcctcactttgcctgcatcctggccccgaggctggtaaagcaagcagtcatccatggggcattagaacctggacctggctggcagagcccatgagcagcatggaatgtcctgtgtcacatggttgtcctgtgtcacctggagcccttcctcgggctaataccaggctcaccgaactaaaactgaaagaatgccagcacgccatggctcagtggctttgcagtcacctgaggagtttgcaggttttcaacaccagtcctgaacctcacctcactgaatcgggacatctgaacaggagagccaggcaaatggggttctttaaggaatgtcagataaaggtagaggcaggaaattgaatgccagtctgggctacatgagattcattaaaagggggtggggggatgtggatggggctcattggacagtatttgtctatcatgcagcaaaccctgggtttgatccttagcaccacataaatggagcatggttgtgcatatctgtaatctagcacatgggaagtagaggcaagatgattagttgctcaaagtcatactcagctatatagtgagtgtaggaccaccctgggataaatgagatacactcgcgcgcgcgcacacacacacacacacactgactctaatgtgttagtattggttctaggtattgaacccagggcctcatgcatgctgccgctgagcctcatatcctaccctctccagccacgaatgcactataagcagccgttatatcctgggtctaaatcaatatgccctccacataggaactctaactcctaaataaatacagtaagcaatactcttcacacacgttatcatccaggccctgtatatgtaatctgacctgcgcatatatagtcactgaacacagtgatagcaggcatgccaccgtccctgctctggctgcttatctgacagtcctctgagttccctcctccacactggtatctctgacaaagctctctgtccccctgtctgaatgtccaaaagcaggggaaggaatgagtcacttcacaagccgcctggtttgggcatggcctcaaggagaaggtggtgctgtaagatatgaagatggtcatgtgtgactgcttcggggtgaaagaaatatagcagaagaggggaaacagtgaagaggagagggatcctggagacccatgggctgaaagctgagggaacgccaacatcaagagccacctagtgctatggctcagctcagggttactccgaggggacaaggatccagggagattagaaacttgcttctaagggtggaagccagaggaaagaaccaaccagaaaacatcggattccctgtcccagatcaaaggcagggttactgagggatgtagccagtgatgacctgcagtattcacatggacactgtcccaagagaatgtcacaggggtaggacaagaagagaagcctgtaaggtcctaagtcctaccctgtctgtgtcgtgctgcctatgatctgtggcatggaagatatgtaatgggttggaaggcagagggtagtaaaagtgtgtgtgtgtgtgtgtgtgtgtgtgtgtgtgtgtgtgtgtgtctgtgtctgtgtctgtgtctgtgtgtacacacacatgagcacatgtgcacacacgttgcaggggtacatatggacgtgtacatgtttgtgtgtgtacacttgcatgctggaggccagggttgccatcagctgtctttccccagtcactttcaaccttattagttttaagtcagggtctcttactgaacctggagcttatggattcagcaaggctggctgaccagtgtagctttaggaactctctttgtttctcttcctacccagcgctaacattacaggtatgtccaatggtgccctgttctttacatgggtattggggacctgaactcaggtcctcatgcatagcaggcaatttcctaactgaaccatcacccaacccccagaagtgcttttgaggaaggagaacttctggagcacaaagcattttctccgaagtttacaggaagtaaagataccaggctgtgtatgtggggctcttggattcaattctagtcctccctcatatctgatgaagtcctccttgggtcagggtgtaaagctctgcctgtggttcaagtgtgttccctgacctctggctagcatctcctaccccctaatagagatgctgtgtccaggtataaacctatcctgactcttggtgaaaactaccacccagagccaatggtgtaggctgctggagagactgctgaaagaagaagggttagagttcatacttggactcctcaaactatagatgagtagtgggtaagctcacccttcctccagacaggcaggcaggggacccaacctggagatgcagactacataggactatggcatcctgaattggaaaatcacacatggctcagtcgtctgacttgctacgccacgaaacacatttgcctctgtcctgcagatgcacaggctgagcttggtagtgaccttggtgacaaggcctgacagctgtgtggcgacccaggattagctcccagagatctttgtactgcattctggctaactgggctactctagttctctgagtaatttctttccaaaaagatgaaacacaccgtggagaggcaggagtgcagaagaaccctagtgtacaagaatctataaacacttctttatctgcagttggaatgggccctgcctcccagacccataattgccagggactccaggtttgagtcctccgcagtgctgtgggtggtcctggagggtgaaaggccaggctagctttgaaaatagatcccggatacttctctgcgttattttaattttatcttattttatttatttgctatttcccagctgtgtgatgccaacaggtcacttagtgtctctgagcctaggctccatgcttaggctccatttcctaggcagagtgaccgagggggactttttagaagaagggacccacgagaagtgtagttccaatgcaggcagccaagtgggcccctccgctgtatctctccatccccacaagtaattgcattttttttttttttttttttactgcactgggaactattccatcactaggagcttctgtcccttaaactggcaaatatttacctacttgtcactggggattcagatgaagggcaggggatgagggaggctggaatctaagtgagagggaagtatgacaccccgtgtcaggaaccctgagtcagctagacagtggggagcagttgatccacataaagcctctcattgttcccctggggtagtcgggatggtggtgacctttggcatttggctgacgagcatgaggggctgtcgggagggctgggtactggcagtgagggctactcgtcctggttaatagtcacactaaccctataacaagaagcctctgtccaggcctgggtgaggtctgtgtacacagcaggcgatgcattaagtctcctagagcatcctacctctgagtgcatccactcctaatcctgggaaagccaggcagaactgcagaggggcttctgaagctgcccttgggcagcctgggtagggaagtctctagctctgcagtccccagccccaccctagtgaagttggcccctgtctagtcatgaagcagtcccagccaggagcagaggaataaatatttagattggcccagcctgggccccagagtcacgcggtctggtgatgagaaggagacagagatggcagagcacactcccaggaggcagtgagcccccactgtccagtagcaagggagctggggctagcagagggtaggtactgcttgtggaggccctggagcagtgagcagccattggcctctggcctgggctgtgccacacatacacgcatgtacacacatacacacacacatacacgcatgtacacacacacacacacacacacacacacacacataccctggaaaggcagttctgcgtccctgagcttcctcggtttttcgtctgctctgcagtggaaagtgtgatagcagcaggggctgaggctaagcacctcagctgcctgatgccccaggaaccttccagaacatgtaccacagcagagcatcatctcaggagtcctgaaagctaggagccgggagggtaaggggagctgagctgtgcggctgcagggcctatgagaggagagtggctgggctgtgggtgagactgtgtgagccagagtctgctgggcaggagactcacagaggaagggggacactggagaccaagggactatggctgagatagagaaactgaggaagagaactcagctgctgtgtgtgtttgagtgtatgtaacgggaacctttctgtgggaagaggagattgaagaacaacagatctctgtggaaggtggcagcctgtggcctgagggtagggaaagccgggataaatctgggtgcatctgctgaggccagatttgatttgagaataaagaaagatcccaataacagtgtcccaagcagcgcagccagcgggttaccggctcccctgactcagtctgaaaggaagttatggaaagccatgctgctctgtcttggcccatcacaggtccaggcctccctccccaggcttctttccctcccccagcaggaaatgctccctgggcctctccgggaaagcagtctggggggcccacacagtgtgtctcctgtcacgggtgtttttccaggacagctgtctgccatcacttccttgttcctgtggaaccccagcaaggctgagccagagaagtccctctctctgggaaacacagtgggtctcacagaaggtggaccagtgtggggaaagcccagagggggtggaatatccatctccatgaagtgatgcagagcaccggcctgagggttgggaggtctgagtttctactgctggccttactgctgtgtgactcgtgatgtccctgacctctgggacccctcttagaacacaaaatagtaggtgttgggctagtggtcctgcaatcgtgcagccctcatcctctccaccatagataaggccgagaagataaggtttggagatagaggaggcagaatccatttactcagctgccctgtgctagctcctggctaccacagaagcaggctggagccacttgcctttgatgccaaagggcctgaatgagtccttgcccaggtgaaccagtgctaaggacagtgagtggctttagggtcagtgaatactctccggggtatagtcaagtgtcaagccaacttcatacctgactccttagctggttcctagaccccaaatcctgcccctcttgctatctgcctcttcagccaccccccacatgctcacctcaattccctctccatctcactgagtcatagtacattccccccacccacaccccttgctgctctcaaacctccttcatactcttcttgctcggttgtctgtgcatgcatggttagggatttctggagcatccgctgtcttctagtgggcaggggtgcactgccatgagatgtgtcccgggcttggagcatgagtctgggagggaaagtaaatgaggcgggcagggcactggaaaggtggctctgcagagctggaggtcctaacacgggaccatatcagagcaggtggtgcctaggagctgaggcctatggagggcggacagatgggggtggggcatccccacagagtaatgggcttgcaggaaggtccaggaagtgacccagcactgctcattccggaaactgtgtttcagtatataagtggcatgggatggcagcctctagaggctttatagggaagacagtgataattcttagagggcattaaatgctcggatggtggggggatggttggatttaatacggcactccggcactccgggctggaaacacctgcattcttcacactgactcggtggcctccctgtggagtcttcccaccatccctccagccccagcctattcccttatccatccttcgcctccaggacagtcagcacaaacttgaactctaggcctttcaccctgggtctgaagctgattgtgtgaagtcagccttccttacctcaggagtcctttaatgacagggcccttggacttggccattcccttgaagccttgccttgaggatcactactcagtgatctcctgctgatgcgtgtggcctcacgggggtcatctaacctgcctggccctccagaccatctacagaacaatctttaccatgtctcatgcctagagtagatgacactgggaacaagggattatagtgtcgggagaaaaaacttggagtcctggtgtatgttctgagcttggtcaggtcttttcattgcttatggtggttccgaaaggcagtactgttgatggactcgttggcaagtgtagaaaccgagacccagagacttcacagattcattggtgggtggttacacatggttactggccagaagcagcaaggccagggtctgatgcagggagttctggttcttagcattccgtcttagctatatgtccaagcctacctgtgcctcagttatacacaggacttcagcaaccctccctgacccctcctggcctcttcttgctgtatgccccagcatttccttatgggataaaggtctctgggagaaaggactgtatggaggactcccagtttgggagtcccagcccagaccctaagcctctatcccatgccaaaagcttttgtccagttgcaccatctgtcttgggcttttgacaacatctggatgaaccttcctagtggactccaggcaaggagagggactgggagccaggttttcatctggcttggattcaaccagatcttaacatctggacagatgttctcaaagcaggggagctctttcacactgtcctgtgtgtttctggagccttgctactgggtcaggtgggaaggccacagtcaggatatgatgtccgctcctttcctggagccagcaaaggacgtgtggctttggggcggaaacatgatcaagatcagagaactcgggctggagagatggctcagtggttaagagcactgactgctcttctgaaggtcctgagttcaattcccagcaaccatatggtggctcacaactatctgtaatgggatgtgatgccctctctggtgtgtctgaagatagctacagtgtactcacatacataaaataaataaatctttaaaaaaaaaaaaaagcaagatcagagaactctggtataaaggggtttttcatagggcagacagtggctagcaggtattcctgcctgctgttttatttgtatcaggttgttggttaggcgcacagagtgagaggaggaactgccatgttcctaggcaatcaaccaaggatttaggtatagtggtcaagtgaggatgttgtgaaggaacccaggttctagtcctatgtctgccatttaccggttctgtgggcctgagcttcagttcattcattcattccttcattcattcctctcagcctcactgcctttctcccctctccttccattttgccctcaaaacaaaatgtctctttcaaactgctttctagctggctgtccttctgcctccacttcccaagtgctaggtgtacactgcacccactcagcctgtttctatccttgcacatcagggaaatttggctagttgatccaggaggtaactgtactctctggggaaagggctcagctgtgggatagcctggactacctggttaaaacaccggctacatttcccctaagtccatggccttgagcaggttacccaacccaagctgtcatcgagctctgcctctgttgtggagacgacctctgagccgtgaggcaatccattggaggcgtaggaactggcagtttctttcccagttatcgacttcagtgactctttgccccacacagtgacagaggacttccttccgtgcccaggcagcagtttctcagtgttggttgcatctggtggttgtcattgctattagtatctagttgagaaacagggaaggaactataaagcgggtcttgtctatctgtctctgtctgtctgtctgtctgtctgactgactgtgtctctgtgtgtgcacacaagtaggtgtatgtgcagatgcacttgagcattcgagtgcatgtgaacatacatgcatctgcatgtgtggaggaggccagtggtcaccctcaggtatcattgctcaccacatattttgagatagtctctcactgggacctggtgtccatggattagactaacctggctagccagtaagttctagggatcttcctgcctctgcatccccaatgccagtatcacaagcatgttccaccacaactgttgttgttgttgttgttgttgttgttgttgttttaacctgggtgctggtaattggactcaggtcctcatgcttgtgtgacaagcactttatccactgaaccatctcttcaactcctcaagcagagctcttccagcctcgtctggttctaaatgcttaatgacttccactccttggggtgggcagagggtatctccgttcactgagcccctcggcagccctgagaacactgggtacttacttagttcatgtgtcactgagaagacagcaggctccagataggattcccacaaggctcagagctgcagataccagtgaggtggactttggatcttgcccgaggctcctcccaggtactgcctgactcagactcctggaatgggagatcttatgtggaacccacctgacagaactgtgcctagccagaatgggatcagccaccagcagcaggtcaccctccagtgtcccctcggccgacccaagttgatggaggatcagatggcccaggctggcaggataaggagatgccagcacggtgacccaagaagggatttcctgtctagaggaagtggtgttaagccgagctgactcaccttccttccaaggctctggtatgaggagcctcagggaacttttctccccagctgggcctcaatttctcttttctaggatattgccctttacatgcccatccccagttgttgcatttaaagtaagtcattatataaatccgtctctagtaaaggcagtcagggagataccttgtagagttacagtattggtgaaatctgttagaagattattaacagggcagtggtggctcacgcctttaatcccaccactcaggaggcagaggcagcagatctctgcgtttgaggccagcctggtctacatagtgagttccaggacagccagggctacatagaaaaaccttgtctcagacaaaacaaaaacaataagaaaatgggctgctcttgtcacggatcatccctgacatttgctggtcacgacagcaatgacaataacctctgtttacagtgctgaatactcacacccctccgggtcatcagctccacccaagtgtgccagggacatgagctgtctgtcccctgtcacagggaggcttgagaaagcctgggacggctaacacatgtggcctaaaggtggaaccatcagcacctccctgtatctagaaccctggggaacactctgaccccgttctccaaacacttggaccctagccgttgttcagtaaggcctggatgaagggggctgccgacgagacagcccagggtacaagtgcagggccatgaaaatcctaggattacattgtctggtgtcagggtagagctgtgggcatagggaccaggaaggttcccagccatacttgctgagcccaggtgtgtcgtgtgtgtgtgtgtgtgtgtgtgtgtgtgcccccgcctgcagaagggctcttcccacattgagaccccttctgagacttactaagttccttctccccaggagagttaggcaggcactgtggttggtgagatagagattggggttggggtatgcaggatgcaggcagatgcagctgagggttctcactgccatcagacagcaaaaggtgcctgaggctctgcccctcttcctgccccagcctccctcatgcataccgtgattccgaataggaaggaaaaccattggcctgctggtcacaccatgagttatccccatagggaaaggggaaatggagagggaaggggaaaggtgagccattccagtcttggaaggcagcaacagctgcagccggctgcctttgtccccacagtccctaatggaggtggggggctaggggccaggctgactgcagaatgcccaggggttttctgaacccccccccccaagagctacagagtaacaaagtctgagaaagctctggaatgtgtgcttgtaaacatgtatgtagtccctcctctccccacagtgctctggcttaaggacactggggtccccactgaggggaggccttggtgatagacaagaaccaaaaacaggtgcaggcttctttgagattaaggtctgtctggtcaaagggttctttggaaaacctcttccggtgggtggttgactttgtcagttttccagaaagctgtggaaaccctggaggtgtgatctctgaagtcacgggtgtgaatggaaaagataagcggtttcttggttatctgaggaaggaggtgtctggaggggcaggccctggtacagtgtgcaggcctgtcctctccagggctggtctggggcctttccttcccgctggtctccatcctcctacccctccctttcaggacgtgaagatcttccgagccctgatcctcggggagctggagaaggggcagagtcagttccaggcactttgctttgtcacaaggctgcaccacaatgacatcatccccagtgaggccatggccaagctccggcaggtgagtgcccaccccagagccccaaccctgcagtcaccctgtcctcattcaggcagcccctcccccactcttcctccccgccttctcttaacattcactcaccatggaaggtcctgattccctgattttgctcccgatcaaactgactacagagccccagatctctactctgtaccgtggcccaactctcaggtcaccccgagctactaatccaggtcccactcttttctgggtggagatagaggtgtacactgtgaattgggattgaacatcacctgtccctcgttagtgacactggacaaatggccttgcctataatgccttggtctccacattaaggacataggttagaatcagaactcatccgggaaaattactgtttgccgccgccctttggcccactggcctgcataggatccctccctggagttctggttttccatagcttatctaagctgacctgtgctgcaggcctaccttgtgacttctttccccccgaggctccaccttttgtccaccctgctctgaaagacctcatcccctggattcagaaagcaggcaacccacactgtcatgtaccctacaacagcttgcctagcctacctaccctgtctcccagaaccaccttgaacttgccaaagagccccagaaatccaagaagcaaaacaagaaaggctttaactacctctagggtatgggcttctcaggttgggctccgttcccctccacggcctgaggaaaaggaaggcaaagtatgtgttcccaccttgtgcctacagaaaaacccccgcgcagtgcggcaggctgaggaagtgaggggtctggaacagctacatatggatatcgctgttaacttcagccaggggggcctgctgagtccccatctccacaacgtatgtgctgaggccacagatgccatctacacccgccaggaggatgtccagttctggacagagcgaggtcagctggggacggccctcggtgggtagaaggggaagcatggggtgggggaggccttgctgagtgactgttgtattcaagagagagctactgagtcacttctgggatgggccatgtggacgccccagttgctgtagctggtagtgggtagagctgaatggcaagagtaaatgggagtgtgcagtcatgagggacaggcattctggggggagggtagaacccccaaggtaggctgtgatatgtcagaaaggcttcctggaggaggtgctgtctctgcagctagaataagaggacacacaaaagacaacctgctaggtcctgagactctttttttttttttttaagagttattatgtatatgagtacactgtagctatacagatggttgtgagccaccatgtggttgctgggaattgaactcaggacctctgcccactcgggccctgctctctccagcccaaagatttatgtactgttatatggaaatacactgtagttgtcctcagacagtaccagaaaaggtcgttagatctcactacagatgattgtgagccaccatgtggttgctgggatttgaactcaggacctttggaagagcagtcagtgctcttaaccgctgagccatctcaccagcctggtcctaagactcttcaccattccaattactacatatactgaggacacacatgttcctgtaggtatgcctactgggtacctttcagaactcagcatctggccatccctggtgccagcatctctcccagagccctcagggcgcaggctaggaagtcaggtcaggtttgggtcctgagtcccctttcactgtacaatcccaaccacatcagtaaactctccaccaattctgattccctggtacacagtagatgaggttggtgggtggatgaggttgactgtgatttaatgtagcccatcagcctagcctcaggcccggggctcacccatgttcatccccagggcagccgtgagaggggtggcaggagagaaggctatcctgggctaagggactcctgccttcttcatgcttgcctttccccccaggtgtggacagttctgttttcgaggctctgcccaaggcattagaacaggcggaattacctcgttgtggacgagttggggatcgaggaaagccctgtacttgccactacagtctgagcctggcctggtacccatgcatgctcaagtattgccacagtcgtgatcggccagcgccctacaagtgtggcatccgaagctgcaggaaaagctacacctttgacttctatgtacctcagaagcaactgtgcctctgggatgaggacccctaacaacaggagacagaggaccaagaacggatacttgggcctgcaaattcttcgctgaccaccagagagcgtggcaacccaatcaggtcttaggtctcttcctgagccgctggccctgaagccacaacctcatctgcatgactgtgaaagggtgtcaccgcaaccttgaggcagccctgatgcccacctgtgcccatcttgaggcattgggggtggggggggggggaggcagttctccagacggataccctcccctcttcctttcacctgaaatgtcccgcgaaggtggaatcaaaatgcaccggcctaggcctttatggaacttgttccggaggcatggccctgtagcacactatctcaccagcaagggaaccagagagggacagctggggactcgtgccccagctcctgtgtctggttacagtgccttctctctaccctgggggcaacggggagtagggatgctgcctccaagaccaccgcgtgtgcctttcctgagacccaatttggatacttcagcgggcaccgattcttcctgcccctggactgatgtactttggtcaggttctggggcagggagggagcatgaagtacaaggaaaacttgaattccagatttttaatgcaaaatatttatcatttgtaccagaaataaaagtcttttaagttttcactcaccctatggcgccagcttaggctttcggagagaactttgtcccgtgctgccacctagtgtcagaaatgtgccttacatggttagtgccagtctgggcaaagcaacttctaaaggtcctattgtgtgatctgtgagaggctctgtgcttaagatgatggaacaagggagctgggaaggactcagtagttaagagcacgtgctgcttttttacagaggacccaagttcgattccttacatccgcttccagtgtggggagtgtcacggacacctgtaacatcaacataatggagatcggccaccttttatggcctccaagtgctctaacacatataataaaattaaattaatttaaaattaaaaactagggacttcaggatggctcagtgattaagaacactggctgctcttccagagatcccatgttccatgctcaagacccacatggtaaatctgatgccctcttctggcttgcaagagaccttgtacgtggagctcatacatgcaagcaaaacaccagtggaaacacaagtaagttatataaatgatgaggcaaggaccgaagacatagctcatttatagcgaatttgctcaggatgggcaaggccatggtcctaatgtcctgcacaacaaaacaaaaaagagaacagagaagccagtgaataactgccaaaacaaaggcaaaagccatcttagaaccagacatccagcatccacatctgggccctcaccggaagtcatggtgctcaccggtagttcctgcacccaggaggcagaggcagaaggttctatgcagggccagccaagctgcatagcaaattgcaggctgggatatttggaaaggcttcaaggaagaggccgagtgtgggctgaggctcaagaacagtgagtgtagcaaggtgaaggccacctttatgggtagcaaagcctctgattccacagagctcctcaaaggccttagggaaggaagcagcagagtgcagaacagttccatctatccaatgcctccagaaaaagactgcctataggccagagggtctgctgagaccgggtttgcagaaccaaggaccatgcagccttctcaggttcctgagcctttcttctaagcgcatctgtaagggcctgctgcaacctggttggcagacaaggaaggaggcctgtctgtcctttttgttttctccctcctgcctagtgcatgtatccgtcatgatccctaacatctgctctgggtggaagatgggaccttggagaaggcaccctctccttctgtggagtcccttccttctttccctcccccatttggcttccaaatgtccagaagaaacacgtttcaaaatgcatgttttgccaaacatagtcctaggctagggctacaaaatgagaatttactgtaaataatataataataataataataatgcttcaagccaggtgtggtggcactttgggatgcaggggcaggctgatcaagagttcaaggccagcctgagctacaaagcaagttcaaggctagccaacgtgtgctacttgagatcctgtcttaaaacaacaggggctggagagattggtcagccattaagagtccttgctgctcttccagcagagcgcccattttgggaggctcacaattccagtttcaggggatccaatgccctcttctggccccaagggttcccacatacactgcagaaaaataaataaaaataaaaatcaatctctggaaagcataacacaacaaacaaaacagaaaaagacgtcaggaatgttttaaactagggttttaagcgaggcatggtggcacgtgcctttaatcgtggtgcgtgagaggcagaaggagaaggatcaggacttcaaggctagcttgggctacatagcaagtctgaggccaacctgggctctgtgagactctgactcaacaaacaataaaaaaaagttccagttgggtgtggtgacacacatctataatctcagtattcaggaggttaaggcagggggattgctgagagttccaggtcagccatagcaagactgtctcaaaaacaaacaataagtaaaatgaatgtttcaagacctggagtgtttttctcaacttcctggctggagagctccaagcttgcctgctccctacactgatggagctccgaaggctgtctgtccaggcttctctgcctagggccccttgctgggcatcagaggtggggtaaaatgtaaagctcccttagagttgggggttgaccttacctgattctgatattccagggtctgagtcacagaccacaatggtgaattccacccagccttatccctgcctctgccacggtgccccgagctccaccacagcagtcagtgggatgagtggtgccaagtcatcaccgtaactcagagccctttaggtagctacaggtggtcagcgatggcaggtcagctctggcagagaaggctttgcttactgtctgccttagtcactgttgtattgctgtgaagagacaccatgaccacagcaactcttatactaaagaaggcatttaattggggacttgcttagagtttcatgatcatcatggcaggaagcagaaaggcatggtgcttgagccagagctgagagctttatacatcctgatccgcaggctgcaggcagagggagacactggctctagtgtgtcaaagcccaccttcagcaacacgcctcctccaatgaggccacacttcctaatccttccaacagtcagccaactggaaaccaagaaatcaaatatatgagcctatgggggtcaactttattcaaaccaccacactgtcttagaggtcgggtgaaagccccttcgagaggccattttatcagtagtcattcctctgtgacacttcaaggtttacaaagtacctttctaaccaggtgtggaggctcaggcctatggtcataacccttcaagacccagtccaaataattgagagtttgaagctagcctaatctacatagcaagatatagtcttataaaacaaaacattaacgaaggtgtctccgtgtcaaatattccactggatctttgtggggatcaggtaacattttatagagttacaactctcatgtaaaattgagtggcctgctgcagtggtttgaatgggaatggctcccacagattcatttgcttgaatgtttactcatagggagtggcactattagaaggtatggccttgttggaggaagtacatcactctgtaggtaggctttgaggtcttatatgtttaagctacacccagtattgcatgaagtctccatctgctgcctgtggatcaagatatagaactctcggctccttctccagcaccatgtctgcctgcttgccgccatgcttcctgccatgatgattatggctgtttgaatatgcttgacccatagaaagtggcactattagaaagtgtggccttgttagagtaagtgtggccttattggaagaagtgtgtcactatggggataggctttgaggtcctatgctcaagtctcctcctggctatctgtggaaaatagttctctcctggctgagatgtagaactctcagctccttctccaggaccatgtctgctgcacgctgactgccatgcttcctgccatgatgataatggactgaacctctgaaactgtaagtcagccccaattaaatgttgtcctcaataagagttgccttggagccgggtgtggtggctcacgcctttaatcccagcacttgggaggcagaggcaggtagatttctgagtttaaggctagcctggtctacaaagtgagttccaggacgccagggctatacagagaaaccctgtctcaaaaaacaaaaaacaaaaaacaaaacaaaaaaaaaaaaaccaacaacaacaaaaagagttgccttggtcatgatgtctctttacagcaataaatgccaaatgaagacagaagttggtagttggtagcaggagtgggatattgctgtgataggcctgaccagatttttgtttggagaaatgtggatttggaaagcagtggaatgctttgaatggagctcgatgggccatcctaataggaatatggaagacattggtgctgagagtgtgtgaactgtggtaacctggctcaagaggtttcaaaggagaggacttttaatatgttgcctggatataacttttatgatgttttattgaagaatttggctgctttttgcccttttcttgggaagcagcctggggctaaggtaaagatattcagattggttgcactgatgagggaaatatcaaaaaacctagtatagactctgccctatggttcactttttttttttaacacttaagcaggctttgatgaaagccatacatgagattactcctgcatcttctcaatcatttcttccttatatttgcccttctcctttcctacctgtcaggacgtggctttcctctccaggatcttcttatggcccgtgtccagctttagcctggtgatgcccaccttgctggggtagatgcccacatggacagttatgccattagctttctctcactgacttgttcaatatagatgacatatttcttcctgtacacttggaccactttgccaatctgctggcctttgtagtgtcctcgaacaacctgaacttcatcatccttttgaatgggcatagacggaacattatacttctctctcagttctttggaaagaggggaggacatgatcttcctccaaatgtgggaaggtgcattgaaatgccgtttgctggtcttgcttcggtcagaagtcataaagggattgaatttcattttggtggcttcgatccagcaatggcctcaaaaggaaagagtctgtggttcactctcatgaagagcattttgatcaagtgaagcaatcttagaaaggaaaaaatgcaaaatgtatggttcaagtattagaagggcaccaggaagtgcattggagttaaatcctgtattcaaggatattaaatggaattaagggagtggtgaccttggggcaagatcccactgagttaagcttattgtttatgcatttgcagttgagcaaggaatagtaatatcatgttattattacctggttattgttttcatttgaacttttaatctggaatgagatgaagagtacacctgggatccaggtcttgaagcgtagtggccatactcataaagatcttgggaaaaggtaaagaaaggctcaggtgcaggcatgatggtacacacctttaatcctaggactcaagagtcacaggcttgtagatctaagttcaaggtgagtctacagagcaagttcctggacagccaatcttaagcaatgaaggagttggaaaacagaaagctggtgatggtgcaatagaacaggggggccatgttccagccccagcaagcagcagaactcggtaactttagctatgtagctcaggctttagagacaagactaaaagggattactgaaacaactgatgatggttaactggagctaagaaattagcagtgattaagaagagaccagcatctctgaggtgaaatcttctgagaagtgttttctgggagcacaaaaaagctgtgttccagagatagccgtcatgctggaagccagatttgctaatctgtaagaatcacccaggtggtactggttttgaaggcatgaaggagtcatggagaacagctgaagcttggcactgtgaaaggccaggaaaggccattgttgaaggtgcagcctcaacagttgatggcgaagggctgaatgggtcatgcaaagaacttgaggctggcaccaagaaggaagactatgagaagctattggtgaagtctagttgcagtggaagaccccagtgtattggagatgccagtaccatgggaggaccaccaagaacagcagcagtagagtggagtcagccagagcctagagtgccacagaagaaagaactgggaaaatgtcccaagccctttggaggagcccagaagatcatgtgtgggtcccagacattggaacaagatgctgtaaagttgaagttaccttggatcctcccctctcaagatgttagagatgtgagagccatggtaacctgccaggaaagcagcaaacaactgtctagctttggtccagtatttccttggcatgatgctttgaaatgctaatgtataccctgtgatgttggaactctgtgatctgctttttgcttttgcttttcggttacatgattaagcgattgcatggatctcagaaaagacttttgaactttgggcttttaaacattgttgagactgtgatagactatggggatctctgaaactgtaagccagccccaattaaagatgtttttctttataagagttgccatgttcatggtgtctcttcacagcaattgaaccctaagacacctgcccaaggccagtgactagtgggaacacagctgaggcaccatggggtcacacacctgtaatcccagcagtaattacacacctctaatctacttgtaaaactagaggcaggaagataagatgttcaagactaacttttgtctcaataactaaagctttactaagtgccaaggatggtggtacgtgccataatctcagcatttggaaggctgaggcatcctgggtcatcctgggctacaaagtgacttccaggatagcccggactacagagtgagagtgacaacttgtctcaaaacaaaccaaaggtgcagctgtgatcttagctgtgatcagaggctgcattgtgagttccagtctggtcctgtctcagaaaggagaaaggaagggacaagaggaaccaaagcagagcctggcacggtggctttcacctgtaataccaacccttgggaggctgaggaaaaatcacaaatttgaggtcgcctcatggagatactcccccaatatccatctatcacaactcacaagccctcttcttccctcttttggacacccctaaaatgtacctcacatccaaccccttctttcccactcccaccccaccctccccactcatggcccatcagatcctagctgcttggctccagctgggcagctgaattgctctcagtccctcttacaagccagactggagatcataaggaccaagtggtaaggaagtgtttgggccttaggcaaggggattgcggtggatgctcccacgtaccctctcacccatttccccacattgccagggttctgcagagaggcagaagccctaagataaatatactcagaagaagagagacccctaaggaattagcaaatctgtaagtcctggaggggtgacgacgctgcagaagataggctacgatgtgccaggcagccagaggaccctactctcaggcagaagctctctctatctaggtcaccatccttctttaacagtctctcgtgggccttcactggattggatgaggcctgctcccatcttaagcacaattgccttaaagaccataaatgtattttgtataacatcctagtctgatgtctgaccaaagagctgggctccagaatgcacccaaaccccaccatgcctgctatctcttggtgttaccataaagccactgctggagtacagtcagtcagccttacctagacagaggaggtgcctggctggcttcactgatggtccagctgactgcagcccagcctaacctgagcgttcctggggtggcaactttggagtagggagagagctcataagaagtctgtcccataatcccagcactcgagagtctaaggcaggggggttgctttgcatttgaagctaacctgggctacctactgagttgtggttcagccttggctactgtctaaaatacaagtttggcgtggtggtgtacacctttaattctaccattcaggaagcagaagtagatggtcctttgtgagttcaaggccagcgtggtctacacagagagtcccaagacagtcaggaatacattgagagatcctgtcataagcaaactaactaactaacgaaaacaaaataaacaaaaacaaaatcaatcaatcaatcaaaagacaaaaaataaatgtgcgagcttgctgaagcagtaggagatgtagggctgggtggcaaaaaccaatgcatctttgcagttttcagtttttcttttaggagggaaagagttgaatagtttcagggctaaaaggctaatgggtaggaaagggaagtgaagataaagagaaggggagacctgcccacacggggaggcttccaaggaattggggaggggttgggatccagaggatggggaggaaaaaataaaaagtatatttttcccagtgcaggaaaggtaggtgtggggctgggccacggtggtggtgcaagccattaatcccagaactttgacggtaaagacagtttgaggacagccaggtctacagaggaagttccaggatagtcaaggcaacacagagaaacattgtctcaaaaaatctttaagagagagagagagaagaggcaggcggatttctgagtttgaggccagcctggtctacaaagagaattcttccaggacagccagggctacacagagaacacagagaaaccctgtctcaaaaaaatgagagagaaagagagagagagagagagaggagagagagagagtggaactgggggcttctgtttcctataagaagagagggaaggcagcaggaacggaatgtctgtctttctctccctgccttttaaggcctgatatgtgatatgcagcagaagccagagccagacaatgaaagataccatgacactcctggaaaacaatggtcagtcttgctgctgagcctaggttctggtgtggctcggtggctcgtgacccactacacagtcttgtcagctggaagctcatgaggtctggtacaggtctccatggggttcctgccatgtgaccctgtgtctccacccactctgtcttcctcccgtggtggtggctgtggccatcctccaaggtccccaggtgggattgtcaacagaattaactgggcttgccttttgtgacactgtggtttatttacagcaggtctaagggaaccctgaccaggggcaaacaggtcactggtgggccaggctgaagaagcagtatgggcaaaggctgtttaagccctagggtctgggtagagtaaaagctaacatcagatgtgtgacattgcagcagcgaggagctggggctacaggccctgactctatatgtgtcctgccctcattggccatggacacttacattggctgaagcctgaggataaagtgggcaggtgctatgcacccaggaaccagccttctggggccttcaaagaacaaggagggtggaggggaacatccaactcaattgatcctggggtctttgtgctactgagaataaactctagaagcttcctcggaagccttcccgtgtgggcaggtctctccctctctttacctccacttctctttcctcacaaaggaccacctgcctctgcttccagacttattttttagacagggtcttgccctgtagccaaggttgagccacaactcagtagatagcccaggtgtcttagttagggttttactgctgtgaacagacaccccgaccaaggcagttcctataaggacatttaattggggttggcttacaggttcagaagttcagtccagtattgtcaaggcgggagcatggcagcatccaggcaggcgtgggaggtctacatcttcatcggccagcctctatgagaaggttgacttctaggcagctaggaattgggtcttaaagcccactcccacggtgacacacctactctaaagccacacctcctaatagtgctatttcctgggccaagcatatacaaaccatcgcaccagcttagcttcaactccaaagcaattctcaagttctggagttacttaccagactttttaccagaactctctccgccccagaaatgctcccattggtctgagctgtagtcatctgggccatcagagaagccatctaagtatctcctctgtccaggcgaggctgat

SEQ ID NO: 2223 - DNA, 1802 bp, Mus musculus
ccaagaggtgcgcggtctctttaaggcaggtcctggtggtttctgttttctgaaggaagtgacggggggtgggattgaatgaaaagtgctgaacggagtccggagctcaggaatcggggcggctaggggacacgcacggggggcgccgtccgggactcggggtgcgtggctgtacgcggcccacgtgaattcgctgcacgtcgtggggaacctccgggttgagtctcccctctagaagtaggggactgccgggaatccccgaaccggacccccaacttcgagcaaactttgtaggcgcgtctccctcccctcggcgcgccccgcgctgccgctgctgctgctgctgctgtcgccgctgctgcttggggcgctgcacggcgtgggcgcgggcagcggcgctccggccgagctgcgggtccgagtgagactgcccgacagccaggtgatcgaggagagtctacaggcggacagcgacgcggacagcatcagccttgatctgcgcaaacccgacggcactctcatctccttcatcgcggatttcaagaaggacgtgaagatcttccgagccctgatcctcggggagctggagaaggggcagagtcagttccaggcactttgctttgtcacaaggctgcaccacaatgacatcatccccagtgaggccatggccaagctccggcagaaaaacccccgcgcagtgcggcaggctgaggaagtgaggggtctggaacagctacatatggatatcgctgttaacttcagccaggggggcctgctgagtccccatctccacaacgtatgtgctgaggccacagatgccatctacacccgccaggaggatgtccagttctggacagagcgaggtcagctggggacggccctcggtgtggacagttctgttttcgaggctctgcccaaggcattagaacaggcggaattacctcgttgtggacgagttggggatcgaggaaagccctgtacttgccactacagtctgagcctggcctggtacccatgcatgctcaagtattgccacagtcgtgatcggccagcgccctacaagtgtggcatccgaagctgcaggaaaagctacacctttgacttctatgtacctcagaagcaactgtgcctctgggatgaggacccctaacaacaggagacagaggaccaagaacggatacttgggcctgcaaattcttcgctgaccaccagagagcgtggcaacccaatcaggtcttaggtctcttcctgagccgctggccctgaagccacaacctcatctgcatgactgtgaaagggtgtcaccgcaaccttgaggcagccctgatgcccacctgtgcccatcttgaggcattgggggtggggggggggggaggcagttctccagacggataccctcccctcttcctttcacctgaaatgtcccgcgaaggtggaatcaaaatgcaccggcctaggcctttatggaacttgttccggaggcatggccctgtagcacactatctcaccagcaagggaaccagagagggacagctggggactcgtgccccagctcctgtgtctggttacagtgccttctctctaccctgggggcaacggggagtagggatgctgcctccaagaccaccgcgtgtgcctttcctgagacccaatttggatacttcagcgggcaccgattcttcctgcccctggactgatgtactttggtcaggttctggggcagggagggagcatgaagtacaaggaaaacttgaattccagatttttaatgcaaaatatttatcatttgtaccagaaataaa

SEQ ID NO: 2224 - protein, 302 aa, Mus musculus
GTAGNPRTGPPTSSKLCRRVSLPSARPALPLLLLLLSPLLLGALHGVGAGSGAPAELRVRVRLPDSQVIEESLQADSDADSISLDLRKPDGTLISFIADFKKDVKIFRALILGELEKGQSQFQALCFVTRLHHNDIIPSEAMAKLRQKNPRAVRQAEEVRGLEQLHMDIAVNFSQGGLLSPHLHNVCAEATDAIYTRQEDVQFWTERGQLGTALGVDSSVFEALPKALEQAELPRCGRVGDRGKPCTCHYSLSLAWYPCMLKYCHSRDRPAPYKCGIRSCRKSYTFDFYVPQKQLCLWDEDP

SEQ ID NO: 2225 - DNA, 21084 bp, Homo sapiens
ccccaggcggggccaaagccagcgcccccccaggcccctcgcctctgccccagccggggcccctgcgaagccagggtctccttcctccagttcccggccgccgccgccgcgggagccgctgccggagccgtcgccgccactgtcgcgcgctccgctgctccggcccgggcaacactcggcgccgccaggattgccacactccccaggtgagcacgcggcgcggggcgggggccgccggccacgccccctggcaggagccccgcgcctggccccaggcccatgcaaagcagtgatttgcatacatggagctggggacctggggagggggccgggggtgctgccggggcgggtctcgatcccgcggaacacctgcctgctccaacccagcctggcagcacctcctcaccgcgcccggagtggcgccaactcctggtcctgctcgccctttttaggaagccctggcgggttctccagcctgagcccgagcttccttctggacagatcgcgaagtgtaagcgctgcaaggagttggagtgtttggagaagtcgcgggggtctgctggaaagaattcagttttggaatctcgcctcccaaccgcttaccagcagtgtggctgggacaaggttcttcacctccctgagctcatttaactcacctgtaaaacaggacaggtgctaatcgggttccctattgggctgagcaggtgaccaagctcacctagcccccatggcatcctcacagcattgtgggatttagacggggtgcagtttattattagcagagtttccaggtgcacacaactgcttcctgcttgcccctccagtctcccgccccaggtcccaggttgctgtgaggctctacgagatgatggatgtggaagttaccagtgcccaggcttttggtgacagccaccttccagagcggggaagcggcttgctcaaaggtgcacacttccctagtgacagagcctggctggaatcaggtctctggactcccactccagtgctctttgcagcacccatcataggctcacccctttctcttcgtctcttcaagtcccagtaagtggtctgtcaccacgggatggcctgcatggaagcccagaaagctgtgtgcagacaggagggcagggcctcgctttccttcccagacaggactcctcatgaacatgtcttctccttagtcccatgggctactttctgagcacagaacaggttttgggctttcctgcctctacaccttgtttacagtgtcctttccccctggcacgcccatcccaccgtgcactccagtcatgcccacgataacacccagcatttcgtgtgccttcactgtgtatcaagcactggggtgaccaacacttgaaaggcatctttcgtgcctttagttcttgtttagtcctcaaaacctgtacattgtactatgattattgccattttatagatggggaaaatgaggcttagagagtttaagttccgtgttcttttttttttttttttttttttttttttagacagagtcttgctctgttgccaggctggagtgcagtggtgcaatctcggctcactgcaacctccacctcctgggttcaagcgattctcctcagcctcctgagtggctgagactataagcacgtgccactacacccagctaatttttgtgtttttaggagagacagggtttcaccacgttgccaggatggtctcgatctcctgacctcgtgatccacccgcctcagcctcccaaagtgctgggatgacatgtgtgagccaccacgcccagcctaagttccatgttcttaacagccttcgtggcaggttctgagggccttttcttagcttaccccctggttggtaactgatcaattgcttcattctagtgccagcaccccagcacctagaacagggctgggcacacaacaggtatcagaaagtgttctgtgggtgctacagtggccccagaggaacaggaagcacttaattgcttcttcaggtccacatacaccaccctccccagtcacatggacctcccttccccacgctcccgaaaagaagggaggagagaaacttcttcttgcttctttttctttttcttttttgagatggagtttctaccttgttgcccaggctggagtgcaatggcatcatctcggctcacggcaatctccgcctcccaggttcaagcgattctcctgcctcagcctcccgagtagctgggattacaggcatgcgccaccatgcccggctaattttgtatttttagtagagacggggtttctccatgttggtcaggctggtctcaaactcctgacctcaggtgatctgcctgcctcggcctcccaaagagctgggattacaggtgtgagccaccgtcccctgcactttttcttgtttcttctgggtgaggaaagagaccagcaagggcttattggaggcccaagggggtccctctcaggacactctcagcctctgttccttccttccctcctattcaacactcccccaactcccatccccttctggccttttcttctcctccccaacttcaggtttggccccttccctgaagtccatttcttacctacaactgcactcacctaccaccattctggaaaaatgcctgcacacagcttatatacccctgtgtgcttgtgatttccatatctctatttgcatattatttgcatggccatgtgcaccgagggtctcattctccgaccaccttatctggggcccgttgccctttttcatgtgcaaagtcacatttcttctctgggctttagttttccaaaagtcagagaggcccatatttgataatttcaaagggccttctgtctccagcagcctaggattctggggttctggggggaatggggatatggagttcttgtggggattggggtggaagctgaggcacagataggaccttggaggttcacagctggaggcacagctttgggttccaaacttggagtgtggaggtaggaggatgaacggggcagaaggggctgggtggggagaggatagcagatactccctcacattcattcatttactcattcactcaatgaatatagattgagtgcttcctacgtgccaagaactgtgctccatgctgaacatacaccatctgattttagtcagtgccactttagatggaaggtacaattattagccctgcgttacagatgagaaaactgaggttcagagaagtaaacgcagctagtagactacagagttggtatttagacccagggctgccaaccccaaagccaggattttagtcctgccctccagtttctgaatctgagcttccccttctcttatcagataacgaggtagaaagaacctagatatcattgaacccttcatttgagggacctgaggcccacaaggagggggacttaccccagaaaacagaacaaacatatggctcagcagagacgtttctactcttccctgcttctccctcatgtgccctgaggcttagaaggctggggtgccctctaagtcccacctgtgtatagggttgagggggaatggtgagcaatctttattccttctctctcagacttgctcactgatcatttcagttagatgagctagaatgggaacgtagagaactcctttaccccttcctcctttagcagttcttggagactccatgaaaccggttttttgagctctgggctggagtgagatagagaggaaaatgtcaacccccctgagcctgatactccctgtccctgtttagcttaggagaggaaaagctgtggggaagagagagagataggggtttgcctggaggttagaaaggaacagaagaaagaaagggaaaaagaagccaggacaggaaatttctgtgcctttggacatcaaaagaactatatgtaaatgaaatgcaaattaaatgcaaatcatccctccctccctcccttaccccacctctctcaacagctggaggacttttttcagagtagcagaagccttactccaggatgctgtggttttgaaactgtcatcaattctgacccctccccaggtcctccggggtctcctggagtgacatctaacccccttggctgcacctctagggagtcactagtgccccaggcttcatttctatttgaacatatcatcaacttcttttgtttcaaggacagaaagctctaagagtcaagcctcctttccagacacagtgggtggaaatggtgcacagccctggagagggtactgcgtggagtgggcccaagccccatccccacctcagcagggaaaagggaccttcttggctgtagaccctgggctcactcccatttcctgtcctgtcagctggattgagttgtcagggctaggagaagggcggagagtgaggcatcctggaaggccaccaaggaacaagtcccttctagccctttccttctgccagatgggccatggggcccagagcgtgggggtacaggagagggtcagctccttgcctcagggtgatcaaagagaatggatccaaactcagattcccaataaaagcagatgggagcaagggagaggctaggaaggacttccaggcctgttttaaatcatatgtcaaggtacatctgagggcatcattgccgggaggcttttggtggaggtggggttcgtgtcagggtgacacagtgaaaggtgtcttgggaaccaggataaggtaactgtgactggcgaggggatgggtagaggacaccagagtcaggatacagagctattctctgctctgatgtctctaatgctgaataccccctgcccttgcccaagagacatctccccatacccagccttcacccatgtcggggggcagtacacacacattcattgtccattttgcacttaaaagttcagaatcattgataatagcaacatatatttaatttaaagacaacataacagcaactctgcttccaatcaatttttttgactttgaggccggcattggacctgagctggatctttctaactgcaccttcgacagagcccagcctcagcctctgcctcagccagccctttcctggctgcctggacccacctcaccccaggtaaccttcccaatccacttacacgctcagggcaagtctaggccctgcgcgccctctcgtggtcacaggggcgtgtgaccctgacttttgcacctctacctgcaagaccctggagagatcttttcacaggagtgcccatccatggctgggggatgcacaggggagggccccaggtctaggcaagatggggatgttgaattttagtttcagactaccattgggtcttccagtccctgctccccatcaaagaccagacctcagcccagaaccctagttggagtcagccagcttggttgtttctgctcagtcaacgcagtgacaggtgctcctggcccgttgggctatccgtcctgttgctggacatctctgccagtcaaaatgtcctacctcctgtacttccctttgcagctgcaaagggcactgatccccgtgggatcagcgtatagacaaggactgagtgtgaaggcgcgaaagcaggagccacgagggtggtgatattcacatgggaaggacctggaatctgccctgacttcggtgaaaatagttcagccatttcagtaacagatgacttgtgacacatatcctagctgattgctgcatagccttgagtagcgattccaaggttggaaagtgctggggaggaggatgctggcaaaaaggtggtctgtgaaggagccgggagaaatagggcagaggtggagagggacctggttttgaggtgtttttttattttgttcttaagatgagaaagaatgcgaactctccagggccactgggaaggaagcaggaaagggagcaatgctagaggaagaggggatcatttcccccagagagggaggtccgggagagtggggagaaaagacatgtctccatgaggacaggaggggaactgggaaggtgggtgccagcgtaggccagggagtggtgaagaggcttctcctctcgaggcttctgctttctgtgatgtaggaggggagggagctgcctctcatcctgcctctccctgcttaggaatcaggaccttgtcacaggagccagggctggtgagatagttgccccccaggggcatgtggacaccacccttgtgactgtctttccctggctccactgagagctcctgaggtccagcccttctccatggaggtctgcactgaatacccaccaagtgagcctacactttccacccgcttttaccctcttcccttctaccactaaccttctaggtccccagctggggccactgtggttatcagtcagggtttctgcaggaaaacagaaccaacttaactcggagtgcctctaacaaaggtgttattgacagagatgccagcaggcttaagggaaccagcacccagagaggggctgcacagagaagcgagggcagaagaggcaacaggaggagacagtggtatgggagccccggaagatctggagccttggaggaatgaagccagtgccacatgtgtggtgctgaggcagccagcagggaactgacaccccactgctgtcctgtgctcccacctgcagtgcttctcatcggctgaagccagagggtgaggaatcccaggtgagggcagaggagggtggaggggaacaaccatcccagctgtcacctggctacagccaatagctgatactgagaataagccctggaatgctgtcatgtttctcactggtcaaacagcgaacagtttatgacaataccaagcgatggcaggcatgatgattcattttatgtgccaatttggccaggctctcatacccagctgttttgtcaaacattagcctagacgttgctgtgaaggtattttatagacgtgactacctttataatcagttgactttaagtaaaagatcacccctgtattgcgggtggtcctcatccaatcagttgaaggcctaaagagcgaaaatggaggtttcctgaagaagacattctgccttaagactataacacaagagtcccgcctgagcttccagcctgctgccctgccctacaaatttcagactcccggctggccacaacattaagttttgcctcagctgccagactgctagtttgttaggattttgggcttgccagaccccaaaatccagcaagctaattccttaaaataaatctttctctatgtgtgtatcttactggttctgtttctctggagagccctgactgataccacaggaatatgagagaacgggaactttcagacactgctagttgtgtgtaaactggaacggccccagctgtagggtgatctgacagcatctacaatgttcacgcctgtgacacagacattccagttgcctgttttttcttttcttttttggagattgagtctcactccatcacccaggctgaagtgcagtggtgcgatcttggctcactgcagcttccgcctcccggattcaagcgattctcctgcctcagcctctcaagtagctgggattacaggcgcccatcaccacgccggctaatttttgtatttttagtagagagggggtttcgccatgttggtcaggctggtcttgaacttctgacctcaggtgatctgcccgcctcggcttcccaaagtgctgggattagagtcagttgcctgttttttctattcctgcctacaacctggcttgtaagagcaagtcacagtaaacaattcgattttccatcagtagccaaatggccaatagaccatttgggagaatattaggcgattagacatggaatgcccgtgttggggaagaccttggagataacccagtgagaccctctctcttatgggatgtgtgtgacccacacaaggtcacacagagctgggccccagcgggtgcccatgctcctcagatacaatgctggcctcgagcctttggttcttgagagtggcacttgccctcctttttgccggagtccttgtcccctcatccaccagagccaggtccaataaagaccctggggtagaggtcctccagctgtggcccacagttcccccactgaaggcctcccttggctaacaagcctgaagggagagatgcctgaagaaaacccacaggaagtccatagtgaggtccagcccagcccgggtgaggttgcccagggaaccaggcacaactcatcctcccggcttgcagcagcaccagtttctggcctccccgagggtgctttgcttaccctggcaaacggaaatcaggcagttcttcctgccaattctggtcccaggaatctttggacactgtccccaccaccccctgcccacatgttcaatgattgctactacagagactggcccagcaggtgctctacactccacactcctccccgtcccaccgaagcctaggtcccctcctgtgggtgagctgtgctctcggaagttctggctggccaacctcataaagcactttgggttgggagggggtgtggagtaagaaggacaggggttggatctcagttctgttctaacaagatgcctggacttgaacttgggctggtcacacaattttataagggagccacatctataaaatgttacagagtcactacaaggagccaatggccaatttatatgaaggcacattgtaaaccctaaagtccgcagagaaataagtactgatattaccactcccaagtgttttacacggccacaaaagcctcctgcgatagggaagtcttatctcagtgtttgccaaacagctgaccacctacatctatttcaacaagctcctaagtgattctgatgcacactaaaatttgcttttcagcaaagaagtgactgtcacggcaggatttcaggtgctgtgacagtggggctaaggcggttgggcgagtgctttggaatggtggactcgagcccttggatgtggccctgtgggaggtgcctactttgcagagtgttaaggtcagcccaaagtctcagggattcttctcatcaccatcccctgagactaagaaggagcccaaggcagctggtgtctgtagtgatggtgtccagagccccctcactgcaggggccagacaagctaggaggtgctagtcaaggaaggtcagaaaaacactccaagtcttgaaaacattgctttttaaaaaagcattatttttggtgacttggaaatcagaagggaaaacatactgatttggggactccccttccatcaaaaaaggcacacaggaggtagcaggtgccttctccaagtatccctcgcccacctggagcaatggctggggcttgggatggaggccctggcagaaagggaaggagaaaaaggactggggggtgactgatgggaagctccctccccatcccccagcaaggctgagctggtccttgaaaacaggttcagaagggaggtgtgcccacctgaaaaggttatctccccgctgaccctcagctcaaccaaggccaagcaagcccagctccctcaaccctctggcctgcatgagttcaaggggcagttgcagcctgttctgggagttctgggagcagagtaaaggggaccaccctgcaaaccccttccctcgccaaggccttcaaggaaggatctgactgtccccatctcttccttgagaaagttgggtcacctggggaacccatgagactcttccaacccctaaaacactcctgcctccaccttgccaaatcgttaccatcttccagcctcaacccacaccccaactcttccagaaagcctttcccaatacatgcagcctgcacatccctcgctctggaaccatccagaaccctgcccggcacttcctattacagcctcttcatgttgaaagatactttggaagtgaagagccttccagatgtctgatttcattgagtcaggcttatagctgcaggaatgtctgcttttttcactaatagtaatgatactaagaatggcaaacagcactatgtgctagatgcttgacatgcaagaattcacttcggtctcttaagtaagctcattttatagctaagggagtggaggcacagagaggtcaagcaacttgacccatggctgcacagcaggtaagtagccgagcccagatctgaagcggggttccaatctccaccccatctcttgccttcgcgctggctatttctgactggcttactacggttgcagttatgtctgtctcattgtcttgggtgcagaagttttatctcatccttccctagtaacatcttccttctcctccttccttcctcaaatggctgagcacacagtaggtgctttcgaagttcttgttccaagataggccactgctagggtgtggggacactttctgacatcaggtggcagcattggccaaaagttttctccaaactctgggtctcattagtcaagtaaaaacttaaaacgtttatttctggtagaaatgataaatactttgcattaaaaatctggaattcaagttttcctcgtacttcatgctccctccctgccccagaaccttacaaaaatatttctgtctagagagggaaagagctggtgcctgctctggaggcaacgtccaggtccgggaaaggcactcgtggtctgtgatctgtctcagtgatgggaggtctccactcgccccacaggcagcctcggggccagagatgagaatatgctgtaatccagtacaggggctgcgtcgtgggtccccaacagctccttctttggggatagtgagccccttgttggggagtaggaagggactgaggggccagctccttccagatgtgtgcatggggaagggagttgtgtctggggaggtgggtgtccaggtatagactccttttagggtctaaacgttcaaggagttcaacagaacaaccagaggccatcatgttttggcagcttgcaagtgaacactccaggggagatgcaggagggaggggtgtagatctggggagcccttctctccctctctgcccgcaaggaaggcacagggtgggaatgggggtgccttcatgagaccccctgccatgccacacccccttcacagtcatgtgagatggggccagaggggcccaggctctagggccaggggagtggggagggagggaaataaggcctcaggtgggggttgccaccccctctagtggctggtgaagagcagtgggcccagagcagccacccgccaggttgctcccaccctagcctgggtagggatcctcatcccagagacacagctgcctctggggcacgtagaagtcgaagctgtagctcttctggcagctgcggatgccacacttgtagggcgtgggccggtcgcggctgtggcagtacttgagcatgcaggggtaccaggccaggctcaggccatagtggcagacgcagggcttcccgcggtcccccacctgcctgcagcgaggcagctccgcctgctctgaggccttgggcagagcctcgaacacagaactgtccacacctgggggagagaggcaaggatcagggagggagggagggagggagggaaggagctcccctagtcagaggccgctgccattccccacttggtctcctctgtcatcccacaggcatttacagacacctccatttccaagcttgccatgggacacagaggtaagacctggttactaggctcctccttgctgggctcgtgggagaaacagattgaataggaatcaccctcctctatggcatcaactgtgtgctacgggctctacttacagtacctccatcagtcaccccatgggctaagtatcgtcatccctgttttagtgatgagaacatcgacccagagtttaatgatctggccaaggtttcaaggcctccactagaccacactgctacccaatgctttaaaaaatcaccataccggagtgtgctgagatagaggcgtggggagacaaggttggaagtcaaggaaggcttcttaaaaaaggtgacatctggccgggcacagtggctcatgcctgtaatcccactttaggagtctgaggcaggtggatcacctgaggccaggagtttgagaccagcctggccaacacggtgaaaccttgtttctactaaaagcacaaaaattagctgggcacagtggcgggcacctataatctcagctatcctggaggctgaggcaggagaattgctggaacccgggtggcggaggttgcagtgagccgagatcgtgccattgcactccagcctgggggacaacagtgagactttatctcaaaaaaaaaaaaagtgacatctgagtagggctaggcagagaagggccagcaaagcacacccacagaggggcaggtcaggtcagggtggccagggcttggatcaaatgggaaagtgtgcatattggggcgctggaggagacggaaggtaccggcctgattaggctcaggggctgtatgggaggggccagcttctggaggacacttatgtcaagcttgcggcatagtctggggtgcaggccatgggggagggtgtatgtgtgtggggggcaagaccacagcttggttgggtatttctaaatctgggcctgccctgggaggagcaggcatttcaccagtgctcagttggctggcagaaggcacaggggctcagagttggaatggcgccatttccctctcccctccacacaggggacctgagggcggtcctggaaaaggtacccagagaggggtcagcgctgaagtcacagaggtcaggaaggcagggaccatgcagtatggagaggagcttccaaggatcttggggcagagatgctggcaccagggagggcctgaagctgatatctgagaggtgtcagtggaggggggcagggtgtccttgtgccccacacccatgacagaaggccccatctctgtgtcctcactaagggcagggacaaggggaagtacctgggaatctccctccacagggcctagcagagtctgtgtgccctgcctggagcagggccctttcctctggctgaatcttctcgctgaataatcacacaggcgccatttcctccaggaagccttcccagaccaactgtagcctggtttgggggtccctccctgaacgcctgtagctatcatggtattctatcacacttaactctgtgcagatctaccctgctgggggacaggaactgagtgtctacatctctgattcctgcgccagtacatctctgtaggtgttcagtaaatgtctcctgaacaaaggaaaggctaatgatgagacttggctaatgatgagactcaactaatgatgcccctgccctcctccactgctctgtgctgtctccctgtccccttccctccgcccagcagcgggcagtgcccagctcccagctgaccttgctccagccagaaccggacatcctcctggcgggtgtagatggcatccacggcctcggcacacacgttgtggagatgggggctcagcagggccccctggctgaagttgacagcgacatccatgtgcagatgctccagaccccgaacctcctccgcctgccgcactgcccggggatttttctgtgtgtgggagagaagtcactcctacctggcttcagaatgctccctgtccatcttcccctgaccctccagagtcaggcgagcccaagctgactgcctttagaacgctggggccatctgcagggtggcagccccacccctctccaactggcagtgaagctgatgcctagagtacagtcgagccttttcagcctctatccagaatggatgcttcccaaactatgtgctggccactgggctgacctctggggcttgatggagaatgctgaggtgtggatgggaggtggaggtgggtgggccaggcaagctgtgccagggcatatgacctctggaatcacgtactttccaacatccagggaaccaagtccctttgggaaagcaggcaaagcgcaggggcgaggaggcccccagggcaggctctgctgggcaggccagggaactcagatgaggctggggcaaggccctgggtctaagaagacagcaggagcaggccggcagctttgagggtcttgaacacttcacatatgtttgctcactgaattcccccataacccagtttcagtgagaaaattgtggctttgaaggtaacttgtccaatgtcacccaactaatgagtgacggaggagatgtgatgtctgatctgacctcagagcccaagcccctagcctgtcacacacggggaggtgctggaaccagatgggagaaatctgagagttggggttcagttagtgatctgcagctctagggtcaggtttggcctggggcaaaatcaggggctcaggactctagggtgaatggggtaccagggatgagggcaggtcaagggcagtgggtccaggaacagcgtgaagatgaggagctgggtgggaggctaaggttggggaatcagagcttagagctaggctggctgcaggggtcgggtctgcaggtcaggatctgggccgggtctgcgggatgggatctgggccgggtctgctgcgggtcaggacctgggccaggcaggcctggtggggcacttacctgccggagcttggccatggcctcactggggatgatctcattgtgctgcagctgggtgacaaagcagagggcctggaactgactctgccccttctccagctcccccaggatcagggcccggaagaccttcacatcctgaagaagggcaggaggatgggaacggctggagggtgtgggaccttcccactggcccaccgggtgctcagcttggcccctgaacaggatgcctggacactgccgggcaacagacacctccctcctgctggtctaggaatttttatcttttccgtttaaacccgtgacttgaaagaaagaacacaccccagatgttccaaagatcctggaaaactgacaaagtgaaccactagagtttttcccagctgatgattcctctcggcagaaccccttaacgtcaccctgatcagggtgggtcagggcctctacaggcacctgatcagggcatcatggaggagggctggacttttccagtaccgattccagagttcctcttttttttttttctttgtagttgtaatggctagaaatcttagacattcttattcagtagatctggggagaggtctcaagatgcccttggtgcttctgattggccaggctcctggccaccgacctctgagtgagtggagtggtggggccgggacggggtgagggcagagtgggaggctggctgcagctgttgcagccttccggcctgagggagctaggatgcctcgcctcttcctttccctccccacttcccctttcccccatggggtcgctaatggcattgccgcagtccaagggctccttcctgttactgactcactgtgtgaatggggggtctgcagcaggatggagggagtagagctgtagggtgggctggggcccccttccctatccggctgctggagccctgtgctctgctcacctgtaccgctcaccacatgagaagtggccccttgccttcttacccatctctgtgacttgattaactctgctcccagtgagaagttagtgggtcccagtcagaagtggtctacatctgtcaaggcccctcctgtggtggaggcaccctgacctcagtgaccattctctgctgggaacccctatggctctgcactgagacttagaatgacagctctgtggatcatctattaatgcccgggccccagctccccccaccacacagtcactgagtacttgctgtacacccgcgagaacagaagtgtctcagcaacaggctctgagtggcccccttggagtccaatacatgcggcaagggactcacagctccgccccgaagctgcaatgtattagtgagtcctccaggctttcccctaatttctctgatgtgtaaaatggggatgatcccagttatgtgacagggttgtggtgaggactaagtaagttatctgaagattctcacatggggtcagcgctagctgggattactcttgtaggtgaccagcaagcatcgtaggtggtctgcaacaaacgagtgcatgtcatctcataaatgcccatgtatttctgcagtcctttaactctacagagtttctcttacttgctattattgtaaatcatctctggaacgatgaggtatggaagtatagggggaggttttccagaaagggaaactgaggctcagctgttgaggaaggttccattaggttccttatgatcccagagatttgtgaagaaggtgatcagagctcagccaacccctgcttcctctcaacaggaaatcccttcttggtcatggtgctgcaatctccttgtcctgccagcctgggctatctgatcttcccctcactcaggtcggctgaggagagatgggaggctgctctgcctgtagcatattccattctgggctcaattcctgccaggtgagacttgataccagacttcccctgctagagcttgagccaggccatgtccctggcaggatcccccaggaaggatccaaaaaccacttccctggtattttcagctctgactctttggagagaagcctatctggatattcacagcatcttctccaataccgcaggtgcaggaaatatccggaagtctcagggctgctcaggggtctctttgcttggtgacatcacctgactaccgttggcaaaagaaggtatttgaactttcagaccagactagaggatgaaagaaatctatttgagcttttttcctgcttctatattaataatgtcatcaatgacaataacaaaatgctgtcaaaatgggaactgacagggggtgcaggaagggaatgataatttctcactgagaggatttcctctgtatctcctatttgtataggaaaaagagttactgaaatttgtaactagaagagaaaaaacattgtttccatgggtcaaaaggatgtatgatcctttttaaaatccttacaacaggcggtaggagctatgattgttaccgagcttggattaggtaacctgttcaacgtcatggactaagaggaaacatagccaggatcttaatccagacagtctgacttcaaagcctgagctctcttaaccagaatccataattgcctcctggatcagctagtctcatctccttgatgctcagctaaagaagctggaactcgggcacacagaggttgtgcggtctgcccttgatgcctgagctggccagcagcagaggtgggattaggacccgctccccatcatgcccatctggcggcagcctgccttaagtcagcacacctgccttcgaatgtggcggctctggctcgtggttcctgcaactaccaaacagcatgacacaaataagagaagaggaggcaggaatacccttctaacccgcctgcctgccctgccaggacttctttttttgttttgttttgttttgttttttgagacagagtctcactctgtcaccagggtggagtgcaatggcgcgatctcggctcactgcaacctccacctaccgggttcaagcgattctcctgcctcagcctcctgagtagctgggactacaggcatgggccaccacacccagctaatttttgtatttttagtagagacagggtttctccatgttggccaggatggtcttgatctcctaagcttgtgatctgcctgcctcggcctcccaaagtgttgggattacaggcgtgagccactgcacccggcctctgccaggactttttaaactacaaattctccggtctctcctttgtgtgcatggttgtttttttttttttcttttggagaccgagtcttattccgtcacccaggctggagtgcagtggtgcaatctcggctcactgcaacttccgcctcccaggctcaagcaattctccggcctcagcctctggagtagctgggattacaggcatgtgccaccatgcccggctaatttttgtattttgtaaagactgggtttcaccaggttgcccaggctggtatcgaactcctgacctcaggtgatccgcctgccttggcctcccaaagtgctgggattacaggtgtgagccactgcgcccggccctttcgtcctatttccccagaaaagcacattccacttgctgatccctgagaaggagtgggcagccctactttctgggtctatttggtaacaggactccatcatcctgaccagtgtccctcccgctttccactccttgcacctcagactccctggcaaggttctggggccccctcttcttccaaccttcacagggaagggtgaaagtcccctcagatgctaagcccaggccagatggaagcctgactcccagccttcctccttgcccaggaatctgttgggatgacgtacttcatgtggcctaacacctaaagcagatgcttagctggggaagagcctacaacagggactgcaggcaggctcctgaggctcaggacccaggatagggtccccaagacgggaggttgttataaggctccttctcccacaagcttccaggaatctccagcctacctggaagaactggagcatactacatccagggccaggatctgggccacgcagagggtgtggcaagtaccctggggaaatagtgtttgctagggtcctcgtctgtagttttaagtaaggagtaggtaggctctaggatagcacagaatttaagaacaaaggctctggagccagtgttacccatgttcagatcctggctttgcctctgctggccacataaccttgaagggatttacttaacctctctgtaccatagtttccacattggcaagctgaataaaatgatagtatctacctcaagggactgttgcagggaataaatgagtgaaaggtttcagaacacagtgggctgaactttcagtttctctcttgtggctgcaattcctggctctatgtctgccttgctccacctgaaatctactccactcctgaagacccaggagttgagattgttctcttctagatgtacctatggcctagacaggtcaggtgactcctctggggcttgcaagtaatcagccaatcagtgggagagcactgattagcaggacatggggcagggccttcacaaacacctgggcaggggagtggccttggccaagacacagattcctgttttccaggggatggtggaggaggctgacttctgacaactcaagtcagcaaacaataggcctaggattgaggtttactccaagtgcaatggaggtaaagggtggatgagggagtgctcgttgtccccttaaggttggggctgggggtggcatgagggagggaagacttcgcacagtgagggactcctcattggcccttgacagttaaaggatggagggctttccagcaatgaggcatttacagaagacagccaggcatgagtctcccagtgcccccacccaatcatccctccatgctactatcacccgagtggccgaatgcccttcaagggctccctttgtcctcaccagaaagcctaaccccagagcctggcatcccaggtccctgctcacagcaactgttgcacttcccatgcactgaaccggagagcttgtagttcccagaatgagcgatgctgtgtcacccctaggcctttctgtgagcaggttcttctgccgggatgccctgtgctcagctgtctcagctgtgccttgtgtgcagggcacagctcacaaacgaccctcctctgactgccctcccagtgctgccctcaccagcccttctgcagagttggccaatcccagtcgctgcctctagagcacaaatcccactgtttactcccactgtgtttttgctgacctctttacttgtctttctttccagactcaacttcttgagccaggaaaagtggcttgcttgaagtgcatccctgccccctggaacacagcaggtgctcaataaacatctgataaggaatacatgaagggtgaatgaacaacagcatggaagagttctctgagaaaagcggtgggaatgtactaggggaggaggggaagggtcgtgagtgctgatgaggctggcaaggggtcaggacacaagcaggacgcagggtctgaaccaggctgaggagtgggaggcttcctcttgtgcctctctggaagtcactggtgggtttgagcctggggtgacatgagggacctgtggtttggagctgaatcagactctgcctgaggttgtgagagtgccttggatctcagtgccccagtcagatggtctctgtcctcatggagcaccttctgcccaggcagttagtcatccaagccctctgtgacctgcctctggctcaagagcagcgactctagcctatgcacatggtgaccctggggtctgtcgcacagctggggctcaatgcttagtagctggaggaacgaatgaatgctctagggcctccatcaacccactggcctccaatgtgcagacactctttcttctcggccttgcctgcagctgggctcctgcaggctgatagtgctacagctgctattttggcatctagaaggtttaggggatcatctagttcatggcccagtgaggttccagcagggaagtaaccttcatgagtcacacagtggcagagccagggccagaagcctagacctcctgactctgagtccagtgatcttcatgcttgtcctggctcccctccgtagcccttgtccagatactcaattcctccctgtgcccatcccagccatgctgtctgactgggatccacctgtgtctccagagggaaggctgctctggttcagctgcactgggggaatgcgctgagagacggcagagcacccctgggcagacatcctgtgctcagcactgagggtggggagggagcccctggatcccaggggatagcggggctgtcacaccagccctgactggcttccagactcagataacactgggaagaatgaaacaggctgttttgccacggcctcagccgctgttcctgggggtttatgttgctcacggctgagcctaatctcaactgatgcacaggctcacacggcttccccattcgcgcacaccgtcctctttcacagacaagctgggtctcagtctccttcccgcaaggtctcccagtggctcct

SEQ ID NO: 2226 - DNA, 1084 bp, Homo sapiens
aagtaagctcattttatagctaagggagtggaggcacagagaggtcaagcaacttgacccatggctgcacagcaggtaagtagccgagcccagatctgaagcggggttccaatctccaccccatctcttgccttcgcgctggctatttctgactggcttactacggttgcagttatgtctgtctcattgtcttgggtgcagaagttttatctcatccttccctagtaacatcttccttctcctccttccttcctcaaatggctgagcacacagtaggtgctttcgaagttcttgttccaagataggccactgctagggtgtggggacactttctgacatcaggtggcagcattggccaaaagttttctccaaactctgggtctcattagtcaagtaaaaacttaaaacgtttatttctggtagaaatgataaatactttgcattaaaaatctggaattcaagttttcctcgtacttcatgctccctccctgccccagaaccttacaaaaatatttctgtctagagagggaaagagctggtgcctgctctggaggcaacgtccaggtccgggaaaggcactcgtggtctgtgatctgtctcagtgatgggaggtctccactcgccccacaggcagcctcggggccagagatgagaatatgctgtaatccagtacaggggctgcgtcgtgggtccccaacagctccttctttggggatagtgagccccttgttggggagtaggaagggactgaggggccagctccttccagatgtgtgcatggggaagggagttgtgtctggggaggtgggtgtccaggtatagactccttttagggtctaaacgttcaaggagttcaacagaacaaccagaggccatcatgttttggcagcttgcaagtgaacactccaggggagatgcaggagggaggggtgtagatctggggagcccttctctccctctctgcccgcaaggaaggcacagggtgggaatgggggtgccttcatgagaccccctgccatgccacacccccttcacagtcatgtgagatggggccagaggggcccaggctctagggccaggggag

SEQ ID NO: 2227 - protein, 114 aa, Homo sapiens
MLPPCPRTLQKYFCLERERAGACSGGNVQVRERHSWSVICLSDGRSPLAPQAASGPEMRICCNPVQGLRRGSPTAPSLGIVSPLLGSRKGLRGQLLPDVCMGKGVVSGEVGVQV

SEQ ID NO: 2228 - DNA, 21519 bp, Mus musculus
  misc_feature (1)...(21519): n = A, C, G or T/U
gcccagctgcagcctcggggccccgccaggcctctcgctgcccgcccgggcctgccgggatgggcacgggctaggcctggagctgggggcggggcagggcagtgcgcccaccccggcccctgggaggctgcagcgcccggggacagggcgcagtgctggggcggggcgtgagggattcccgaatcctgggcgaggggcgtgtctcggagcgggagtcccccagtgggccagagcagacctcgcagccgccccacgcgtcacttttgcgaccaagcctattagtgaattctgactctacagcccttggaggggggtgcctagggtggggggcttgcacgatactgcaagctccccgtggacaaggtgtggaagggatggggactggactggtctttaggattgagaagtcctctctctccaatcctatcctaccctatccagttccttagtcccggggcgttgggttctccctttccctccccttcacacaccccctccctaagtcacaagttttctctttggggcttgttgctgcagtccctgctccagtaccgagtacctggctgggccctgggcacgcacaggggtcgtagccccactgtgtgtgggagccatgaggatcctggctaacaagacaaggtgtgtgggtgtcacggagggtgggatatatgtgtgtatggagagtggggaagggaagggcccatgatgatggggccaagctgtttggagaggagcccttcgggcacctggtttcctggccaccagtgggttgaagggaagtagcatggtaaagtctggccccaggcaggagctggcagccagccttagcgcctgggcccagggggcagaggagactggcagctagctttgcctgcttctggtcccttcttcccttctaaaaccgttagaacagaccctcatcctaccctagtgttgggggtgtgatggcgccctccagcctcagtctagtcgggggtaggagctggagtgggggtggtgcctgcctccctcctccccaggagaagcgggcagacagggccaggcggcggcagcaggacagcagagctgaaataaatctgagctggtgtggaatgaggggggataaatatcctctcccgtgatgtgatctttccagcggctattaataggtctccggggagggggaggcggtggggggagcgggctggagcttaaagggcccgcagcctaggctgcaggaatccatggcttcaagctgtactcttgtctgcttgacatgcccccccccccaatccctgcctgctgacagggcctactggcccaccctcttcaggccttccccacttaggctctggggagtcttctggacctgtgggtaccactctcggttatgctttccctagtaccctagggaatagggctcgggcttgagcagtgactcacaggtcctgtggcccttctcagctagttgtcagggcacagcgtagttgaggtctggggccttggaaaggagtcttaaaccctagaaggtgcgaagaatccatcagatgctagggagaaagggctttagtggaagcgctggatcctggggctgaaggtagatagattctgccaagtcaaagcccagggtttccatttgagttgagcctagaagataaggaacactgttccatcgccactcccccaggtggacagagctctgctcttatctgaggaactgcacagaggtagggaatagcaggtggtctccagatagcacctcaccaccccctgcattgttaggagagagctaaagtccaggcatgcctgatgccttgcaggattaatctttcctgtttctcctccctttccccaggttaccccaccccaggaggagagaggctccagggagtccaccgctgtcccctcggggccactgcccccctgccccagccaagccaatgcacccagaaaataaactgaccaatcatggcaagacagggaatggaggggcccaatcccagcaccagaatgtgaaccaaggacccacctgcaacctgggctccaagggcgtgggggcggggagccatggggccaaggccaaccagatctcacctagcaactcaagtctgaagaacccccaggcaggagtgtctcctttcagctcactcaagggcaaggtgaagcgcgagaggagtgtgtctgtggactctggagagcagcgggaagctgggactccatccctcgattcagaggccaaaggtactgtatactgtattccctcacctctagacttcaacatcatctacagccccgagtgagcgagacccaaactgctcagagaccagcccttactcgagtctcatccttgtgttgccacccaacatgtattgtttgtagtaactttctcttacgtctacccatcagtcaaccagttcattccagagcggggctggctagagtggcactcagagaagggcctgacagcagagtgataatactcctgtagcccccacattgaagagggaggtgtctggggtgaagatccaccccctacccacatcatccctaaagcttcctgatgtcctggctggtgggagccttttgggaacaggcactggggcctggaagagtcacagtggctcctccctgcccccccccccagccctaattagaaccagttgtggttgggactatgctgtgctgggtggggggggaggggagacaggcagccagggttagaaaaagaaatcagaaacaaatggtggtgtggtggggaccaaggactggcaaagtgcccaccgtggtctgggcagtgccctttcgggtggggcactctggagaatggtctgggagggcctctgcatgtggaaggactaggccacattgccatactttcttactctgcctgcctgtatcctgcctgggcagaggtggcaccccggagtaaacggaggtgtgtgctggagcggaagcagccgtacagtggggacgaatggtgctctgggccagacagcgaggaggacgacaagcccattgcggccgcccacagtgagtgcccattgatgctgtgcctcatggtgcccttcccctggtatgtgtgtgtgtgtgtgtgtgtgtccgtcctgagggagcttaccttgggctttaggggattgttcaagaaatggcaaggactaggagcccaggctcttcttcagccctactttggactttttccttatctatagtgtgagtgctgctcacaccctcgccaccctccctctctctttcccttcccctctccctccctctgtcgaaggtctctcaggtaatcccttttccggacaactcacctacacatctaacagatttcatggcctatgctgccacctaccggtcagtggaggatgggcaggaagatgggaatctgttagcttggctttgcaaagccttgctaagcctaggtgtgaactgacccttaattgtgtccctggttcctttctccagtctctaaatgacactcagaaaatgctcatgatgcatttctaggattcatagccatttctctcattccaatccatccttctgtgcttgaggcccgagacatccttggtgcttccaacctaactaagcatgtgagaagctagccagagcttaaattgtgtgctgcttacaggcaggagttaaggaaaggagaagaaagatacatttgctactgagtttagtcctcacagctgcccatgaagaaagtgtaatgatgactgtcacagtggaggaaacagtcagcaagagggaatgaggagaccctactgaccagtgtcctgtaagaagtctctacaactggctgggactgccaaggccccatgtgactaactagtgctgtatgagctatgttcagtctcagtatggatgcttgagtggtagaatctgtcactgcttcctgggaccagaaccctcctgtctccccgaatttgtgtctgtaacattatcccgtgtcattggagaaactttgaaagatacagagcgataagaaatagctaagatcccttgaccagcctcttttagatggaatgcaattcagtgaagaccaggtttcatgtagtacagattagcctcaggcttactgtatagatgaggctggccttgaccttctaaccctcttgcctatagctcccaagtgctgggattatagtcttgtgtcactgtgtcattcagcagcattcaaccatgcaactgaattcttcacacagcaaggcagactgaggtagctgtcaatgagacaggctcagagcccaggcgcctttacttacatcccagggactgtaaacttgagaaaggagttctgattgctcatctatagaagtgatctttgtcatatagatttggcacaaggagaaagttgagtccaggcatgtgacatactttgaacagtgctagcttgtattgctgttagggtactagaaaattccttcttgtgataaactctgcttccctctccgtagcctgtaggagcctgttgtgtgctctgatttatactctaggcctctggtgtctgccaccttggtcaagttcttgtgattttgggaagtgctggcacttgctgtttgtagtccggaggctttaacttgttttttcttggtatgaccatggatctctgcctcacctaaaaccactgaagaccagtcgtgggtcttatctatgtgagaacggaatgccaggcttgtgaccgaggagcgaaatttgtcttgctcctgaggaatattcggctgttccgagtatgtgagtctgtgatattgtgaaacatatatttggtcttctcttgtttcctgggaagctccagagggataagtggttttttgttgttctgttttgtttaatgctgtatcgactggtgtgtctggcagtcctgaggtagcttctagatggaacctggtgactgggaaaatcaaagcaggatagaggtttggggctttcagccctacattccatcctcgtcaaaggagtggggctgaaagtcaaattgatcacctgaagctaatggtttaattaaatgtgactaatgattaatctgtaaaaatccaaaaaagagggctgggtaggtggctcagttgggagaaacttgccttgcaaggtttcggattcccagaacccacacaggaagccaggtacagtggtacctgcctataatcagcccagtgatgggactttcaaagcagagcagccaggttctctggaagctcattgtcattgtccagctaacgtggtgtgcatgataaagtctgagagccaacacttagtgttctctgttgagctccatatgtgccctgtgcccttaaactgaatgtgtgcaatatgtatgcccttcccctgcaaaatccaaaaggactgtctcgtgttcagagagggtgcagaagcaaatgccctttctcacgtgccttgcaaactgtgttcatctcacctgcatccatccgtgtgtatgcatgttgttgatgggaacacctccgtgagattcttggtcatcagaggtgaccgaagtcttgcgttgatcatttgtgaaagcctttctgactcttgttgaaactgatgttttgctttgtggcgtagtacccatgtttttaaaaggacttgtccttgggcagggcacgtgggagatgagtagtgtttgcattttgtagatgaagaaactgaggcttaaacaaatgctgttttgtaaaaccacagttagtgaatcgtggggtaagatgaaaatctgtctgtggtttgaatcatcagttactactatgtcctccctaccttccccttggctgggtcatttagacagtaaattcacacacatacacacacacacacacacacacacacacacacacacacagagagagagagagagagaggcagagaaactgactgatctcaagtgcttgagtgtgggagctttagagcagagctttggggtttctgtcactttttctcacctctctccatggtcatctttctgcatcctggccatcttgagcaaaggttagtataggttaagtgaactggaaagccaggctggtaaacggagactgtagggacagatgaccctctgggcatgggcttgaggcagtgagcgagcatctgagggcaggaacaccggctgattggccttcttcccacgtctgggccgctcacccgctctcctttcttcctcctcttacagattgtaatgtagcagacccagccatggtgaccccacagttgggtcctggccaaactgcccaactgcccctcagtgagagcagtgcaccaggcccccaacatggcccccagccaggccttcggccagacgttcctgggggtgggggtgggggcgtcccaggaaagcctccgtcacagttcgtctatgtcttcaccacccatctggccaacacgtaagtctttgggagagatgaggggtgagagggttttgtctgtctgaccagcctgagcaaagggggggtgggggtgcggtgcaaggttggtgggtgagggccagcttgcttttgcccatctctgagctgcctgtggctgcttccctatgcagagcggcagaggcagtgctgcagggccgggcagagtccatccttgcctaccaccagcagaatgtgcctcgggccaagctggatcaggtaagtgtggtagcctgccaggctctaatattctttgggatgtcccctcatctgtcttattctttacctttgtcctcctgcaggcccctaaagtgccacccaccccagaaccactacccctgaatacgccatcagcaggtacaccacagtcccagccacctcctttgccaccgccacccccagcccctggcagtgcccctcctgctctgcccccggaggggcctcctgaagacaccagtcaggacctggcccccaactcagtgggagctgccagtacaggtggtgggactgggggtacccaccctaacaccccaacggctgccaccgctaacaaccctctgcctcctggaggagaccctggcagtgcccctggctccgccctattgggggaggccacgcccaccggaaatgggcagaggaacctggtgggctctgagggcctgtccaaagagcagctggagcaccgggagcgctccctccagacactgcgggacatcgagaggctgctgctccgcagtggggagactgagcccttcctcaaggggcccccgggaggagctggtgagggaggcccaccggcacaagcgccctctgctgctcaaccgcctccctccgcccctcctggggggctgaagaagtatgaggagcctctgcagtcaatgatctcacagacacagagcctaggaggtccccctctggagcatgaagtgccggggcaccctcagggtggagacatgggacagcaaatgaacatgatgatgcagaggctgggccaggacagtctgacgcccgagcaggtggcctggcgcaaactgcaggaagagtactacgaggagaagcggcggaaagaggagcagattggattgcacggaggccgccctctgcaggacatggtgggaatggggggtatgatggggagggggcccccacctccttaccacagcaaacctggggatcagtggccaccggnnnnnnnnnnnnnnnnnnnnatcagtggccacctggaatgggtgcacaactccgagggcctatggatgtccaagatcccatgcagctccgacctggacctcccttccctggcccccgtttcccaggcaaccagatgcaaagggtgcccggatttggaggtatgcagagtatgcccatggaagtacccatgaatgccatgcagagacctgtaaggccaggcatggcctggaatgaagacttgccccctattgggggacccagcaactttgcccagaatgccgtgccctacccaggtgggcagggggaggcagagcgattcatgacccctcgtgtccgggaggagctgctgaggcaccagttgctggagaagcggtccatgggcatgcagcgtcccctgggcatggcaggtagcggcatgggacagagcatggaaatggaacggatgatacaggctcatcgacagatggaccctgccatgttcccgggacagatgactggaggagatggtctcgccggcacacccatgggcatagagtttggtggaggtcggggcctcctgagccctccaatgggacagtctgggctgcgggaggtagacccgcctatggggccaggcaacctcaacatgaacatgaatgtgaacatgaacatgaacatgaacctgaatgtgcagatgacgccccagcagcagatgctgatgtcacagaagatgcggggccctggagacatgatgggtcctcagggcctcagtcccgaagagatggctcgggttcgggcccagaacagtagtggcatgatggggggtccgcagaagatgctcatgccttcacagtttcccaaccagggccagcagggattctctgggggccagggaccttaccaagccatgccccaggacatgggcaacactccagacatgttcagccctgatcagagttcagtgcccatgggcactgtgggcactgcccggctcagccatatgcctctgccccctgcctccaatcctcctgggtctgtgcacttggcctccaacagggggctaggcaggcggccttcagatctcaccatcagtattaatcagatgggctcaccgggcatgggacatctgaagtcacccacccttagccaggtgcactcccccctggtcacctcaccctctgccaacctcaagtcaccccagactccctcccagatggtacccttgccttctgccaacccaccgggacctctcaagtcaccccaggtcctcagctcttccctcggtgtgcgttcacccactggctcacccagcaggctcaagtctccctccatggcggtgccttctccaggctgggtcgcctctcccaagacagccatgcctagtcctggggtctcccagaacaagcagccacctctcagcataaactcttcctccaccctgggcaacgtggaacagggtgagtgatctaggtgggcttgggtgggagccttggtggcgggtaggttcctgcaggggcatgctctgccggagcctcttaaacatcttgaagggtgccacttggagctaggactttccccactggggaaactgcttggagaagcatgggccgtagggaccacagggaacctgtggtcagtgggatatgggtgtgtctgacgtgaggtggagatttgggggacgttaacctcgctagtgacaccccccctcccgctctctttctgtctctccgcttctgtaggtgctcttccacctagcgcaccccggaacagctcctccgctcctcccgccaacccttccagtggcctcatgaaccccagcctaccgttcacatcctccccagaccccaccccttcccagaaccctctgtcactgatgatgtctcagatgtccaagtacgccatgcccagctcgaccccgctataccacaacgccatcaagaccatcgccacctcagatgacgagctgctgcctgaccggcccctgctacccccacccccaccaccgcagggctctgggccaggtgcgaggaggcagagctctctctgggagtggcaacagtgggtttgcttaggaattgcccccgtggacatgctggcttctgcatgcttctatagtctctgctcatgggggtggtgtgagctctgaggccccgtttgaatgactaccatcgcttcatgaaacctagcccagagctctttagtgggctgggaaggactgggagacccctccccaaactgggtgggcatggcctctaatgtcccgttcgtccttcctcccacaggtatcagcaataaccagcccaaccagatgcacatgaaccctgctgctgcccagagccccatgggcatgaacttgccaggccagcagcccctgtcccatgagcctccccctactatgttgccctcccccacccctctggggtccaacattccactgcatcccaatgcacaggggactgggggctcttctcaaaactcaatgatgatggccccaggaggcccagactccctaaatgccccttgtggccctgtgcccagctcctcccagatgatgtccttccctcctcggctgcagcaacctcacggtgccatggcccccaccggggccgggggcccaggcctgcagcagcactacccttcaggcatggccctgccccccgaggacctgcccacccagccaccgggtcccatacccccccagcagcacctaatgggcaaaggcatgactggccgcatgggcgacgcatacccacccggggtgctccctggggtggcatcggtactgaatgacccagagctgagtgaggtgatccggcccacccctaccggcattcctgagttcgacttatccaggatcatcccctctgagaaaccaagcagcaccctccagtacttccccaagagcgagaaccagccccccaaggcccagccccccaatctgcatctcatgaacctgcagaacatgatggcagagcagaccccgtctcgaccccccaacctcccgggccaacagggggtccagcgggggctcagcatgtccatgtgccaccctggacagatgtccttgctgggcaggacaggtgtgcccccacaacagggcatggtgccccatggcctgcaccagggggtcatgtcccctccacaaggcctcatgacccagcagaattttatgctgatgaagcagaggggtgtggggggcgaggtctacacccagcctccccacatgctctccccacagggctccctcatgggccccccaccccagcagaacctcatggtgtcccaccctctgcgtcagcgcagtgtgtctctggacagccagatgggctacctgccaacgccgggcagcatggccaatctacccttctagcaggcccctcggtctggggctggggaaactgaaaatatgttaactttaaaaagttttgtttttcctccagtgttgggatggatggcctgggtccaggggtagggtggcgggtgggaacgggcttgtgtggggagtggtgtttgtggaaacctgctgtgctggcagctgagggggaagcggcaagtgtcgggtgaggagttggaatcgggctctgctccatttctgtcactaggactgcgcctcctctgcccccccccccctttcccgtggagcttctgtctccctttgtctttgcacttccccgctttcagctatgttttgggggtccttggggagagaggagggtcttccatcctctgacccgtcgtggactgtcaccttgccggcggcgcttcaggtccgtttctcgccttcccgtctctctgcttttaccctgttttccttctgcctcatttcctttccctactgacgtggctgacctcctctcccacgccccctgcaggcagctggccaggtgggcaggtgccagcggagctgtaaatagagctgggcttttgtgccggtttgtgcgtgtgccgtatttctgtgtcttgatagaagtcacacacaagaaaaaaaaaagattgagaaaaaaaaaaaccttcccccctctttcaaatgatcacacccttcattcctctggacccagagacatacagtcctatgcaccctccataagccccacctataaaatgagatcagaccatctaggcttccatttggtgagcccctgaggactgagaatctacccccgtccctctacgacggccgcctgtctgctgctgagtgatttccagagagcaggtgcgcacatgtacatgtgtttacccacaccagtgacatagggcccccagcctgggtgcctctgctgctacatcttagccagaacttgaagccctttatccccattctaggataaaaggcgagaaggaaggggcagcgtgtggccccatagaatggagctatggaggggttaggatgctgggaccctggctgcagtagccatgggccaggtaacccttcagggcatggactcttctagaaaccaccacttgcttctcaccaaagaaggaaggtacagagttggccctccacctctagtgcagagcgagggaaggcagtgtgagcgagaacatcctgttgcctcctctgcctgcctactctctgcaaggtccttctgtccagggctcagggccatgcaccagatctgtctatgcccaccagacacagccactgcctctcctctgacttcccaggagagcccctcacccgcccctggtcagactcaagccatacaggaatgggtgttttgtcccctttggccccaggagtaaactacttctgtttttctcacgtcctttcctgccttgtaaggtggcgggcagctccctggctaaggcctttcctgtcctgcctccagggccaagggccattctagacagggtgtcttttaccagggccctgtccccagcctttctgacctgcagggcctggttttgccttggcagctgtaatacaaagggaatttgtgcccacttctcccagtctggtgctgtccaccatcagccaggccaggcaccaagccccctccagagctggctgcaggcccctggcttcccctgctcctcccagggaccatagccaaggtctcttgtgttgagaggtgggtggaaacctgtccttcctgccagacactgccctccctgcttccatctgggccttgtgcccccacccacatccctaccctgcccagactgtctagcctgccctgctccaaggagagggctccggccacaaagggcccaatgccctcttcttgtgccctcgtctcccacctctaccactagcttcccaaggtgatctccacaggccagccttctccctccatccatggccataccccagccattttgtaccattatataaatatatatataaaatataaatatataaatacaatatgtgaagacatcttcctgtttttattttgaaacactttttaggcttgttccgggggtctctgcctgtattgacctgttttataggtgcctttttattaaaaagagaaaattcaaaaatgccatctcttgcatttttatttctgtgcccggtttgcctcttcccagctggttgttggatgctgggagcagaaaagggggtccccaggtgtcttcacggttctgcaatgaggatacagtctctgaagctatagcattggtttccccagtgggatcccccagggagcttgtacggttggcttgagtggtactaggcaactctgcttcctacccccacgcccccagatcggtggctgggaggaagccgagctcagaattgcctgctaacttcccctatgtatgcatggagcagcttcctctggttccatgtgagtggtaccctcccaggggcagggtactgccttcctggggtttgaggacttgcctgcccaggttggcttcttatattgcctctgcctaatgaagacaggaacctctgtcgtcattctcttagctaggtgtcccctctctcgaggctaggaccactttgctatcttgctttccccaggcaagttggcttccttccccattggtgcgtagaatccacgagggccctggatctcatttccccaccagtctgtaagctttggtacattgggtggagaagacagctgggtttgatttttacttgttcttccttagagcctggaaaaggtgtctttccacttttccactgggcctctttcctgctggcttgccctttactcttcttaggatactggctagcttccagaaccttctggaacttgccctcagtctgtaatccaagatccagtaacatggggctgacccaatgctggttaggttggaaccagacagctacctaaagtagatcggtttcagctttctgcttggttaagagaaaggcacggttgaaggtctggcatgaagtctgtatttatgagacaggcacattaaggccatagtctgccgccgccagctggctattcctctgtggtataggagtggtgggtagctgtggcagccagtagtctttaagatgatggaatacattctgggaggagagtctgggctcataatcaggaggaagatgagactgtgggccacagcagaggtggttgtccctatggccaggaagaaataaagctgagcttagctttagctggttaggatgggaggtgtatggagttctcttcatctaaggtgatacaggtggcctggatatagcttgctttgcctttgggctgctttcccctttgggaaagtttgagagagtttatctagctttcccatctggggacactggcccaagctcgagttggatgggttccgccaccactttatcctcccaaggaaaacagaaacagacaggggccccgagacttccgggatctagaaggtggtgagggaagtagcattctctgactcagagagactactcttgcgccagttggggaaaagttggcaaagggaggccgggccagcacagcccagcttggtcagaagccgagagaggtcactgcggaactttacgccagcgaaggtgtagagcatgggattgagacagcagtgtgccaggcccaggaattcacacaaggtgatggccacagagagatagccactcagctcgcagctgctattcacagccttcagcctctccagtgtatctaggaagatgacaatgtggtagggcgaccagcagaggaagaaaatgcttgtcactaaaatggccaccctgaccgccttctgccgctgagggcgccgctgggcctgcagtagcctgtggaccacgcccacgtaacaccatcccatcacaagcatcggtagtaggaagcccccgatgtggtagaggaaacgggaggtgaaccaggctctagtttccgcttcgttttcctgggagaaggtgcactgtggtaaggagtcgttgttatgaggttggccaaccttggcaaagaggagttccggtaaggcgaacaggaagccggccagccaaatggccgtgcaggtgatgtggatggagaggagtcgacggcggcggtaggcgtgaacagcatggacgatggctaggtaccggtctacagctatacaggccagcagcaggctgctgcagtagaaattgatcttgtgcagagcgatcacagttttgcagaggaaggtccctaggacccaacccacagagccctcagccactgcaaaaggcaggatgaagactaagagaaggtcggctactgcgaggtggaacaggaaggtctcggttgagctccgagtgtgccggtgcctctccaggattaccagcaccaggatgtttcccatcatacccaggaggaagatgaggctgtaggccacaggcatgaataccgccttaaaggacgtcagtaagggtccctcgactgtagagcagaagttactgtcctgtaggggaatctccgtgctgttactgtagaaggccagttccttgtactgtaaggaccaaaagaaagagaaatgaaaacgatagccatatcttcttcttcttcttcttcttcttcttttttcctctgagaggaagctgccacctgtgaggtttcctgtccttccaggctaatgctttttgtctgtactattctgtttcctcttggcctgtccttaaacatgccatctttaccctccttcctcccttctgcatatttattttagacaggatctccctctatagccttggctagcttggaatttactatgtagaccaggttgacctgagctttgggtagtctctgcttgctgggttctgggattaaaggcacatgcccccatgccctgtctcttttttttttttttttttaagatttatttatttattgtatgtaagtacactgtagctgtcttcagacactccagaagagggagtcagatcttgttacagatggttgtgagccaccatgtggttgctgggatttgaactctggaccttcggaagaacagtcgggtgctcttacccactgagccatctcaccagccccgccctgtctcttaaatataattttttattctaatttttggtagtgctgagcaactgttccaccactgagccacatccctggcctgaaacttcaggtcttttcttttctcttcttttctttcgtttttgttcgtttgtttgtatgtaaactggaccagtagtcactcacaaagtggtagggtgttcttaaagatggaaggcttagggattgcagtcagtactgacatttgggaatggaacctgataggaacaagaagccaatattccaattctgtaaggacagtgggtagtaaatctaagctctcactgggggtggggaatggttgagtgctgatgtagctggcttacttcctctaaatttctccccttcttcctgtcttgattattgctgaaactgaggaaatggcctcctatttggtttaatccacacacgcttgaggtatgtaatcttcctcttattttacagacctgtcttgctcaaagaggaggtttgcttaaaggcacgtttgcctgtctttagtcaatcaataacgctacaatgagagctactacccacacttccctccaaaggcttctgggaaaggggcggagcctaagtttccagctacttcccaagcagagagtaaactccctaggcacaggaacccagcagcggaggcaaatatgagtcacacacagggagactaggcgcagggtagggaggaagcgttttctgagtggaaaagaagggggcgtgcctgttatatctccggaagtccctacctccgcgtcctcctccccatctgccactgccctccatcaccccagctctcaggttgtttgcctgctaaccacagaggaagacagggtgcctgttttcatacctttcactcacagctgccctgcacctgcgtttcctcagctccttactctgttcttcctgccctgccctgccctggtcaacctcctccctgggcaatacaaaaccaattacacccgaactactatgggttcaaaacacagtgatataagtgatgggccccagggaagtaagagacagtgggctgttctgtcctctaggctctggcgatctcatctctgtgctgaccccctttgaggagagtgaggggctcctgccagtaggggttggttcatggttaccttaaatctttcttgccaccaggcacactgttgtgggtgacacactcacttcccctgatgggtaaactgattccccatcttggtcttttggtccctagagcaggtggctctttcagagaggatggggacacatggtacaatggcagcactatctacccactctccagtgtcccttcttctgccgtcaccttatcctgtcccccatcctgtctctctatgggtctttccccttacttttctttcatttttttttttaaattagacttcaaacctttttattttccgtgtatgagagttttgcctgcgcctgtgtgtatgtgtgcatgtgaccgcctagtgcccatggaggtcagaagaaggccctggtttccttggaactgaggttacagatggtggaaatcactatgtgggtgctaggaattgaaccccagtcctctgcaagagtagcaagtgctcttgaccttggagcctcgctccggccttatgggtccttttctaactactgtttctgttcttttccacttcctacccagtggacagggggagcttcctcgtactcacatcccagccctgcacttctcaggagctgaggggggagggtggcttaagcccacgatttgagttccattgtcggtatagccagactatgtctcaaaaacaaacaaaccaaatctacacctacacaggtcaaataaccacacctaactaggccctatagatctagtgtcctttaatgactccccatcacctgtaagaaacaggtgtcttttgtcttgtttttctgatatcgtatacaatagtaaaaccatttatatatatggctaggtatggtggctcaggctgttatcctaacactagagagaagagccaggagatgaagggctcaaagacagtttcatctacatgagttccaggctggcaagtattgcttgggtctctataacaaacaaacatttttggagtagagcccttgcctagcgtgtgcaaaaacagcctgtgagagagagaatggccctacaactcttgaaaacaatagacctgttagatagggcttcaatgccccaggtagaaggcctttacatttttatctaaagtagtcctggcagtgcatctcagcaggtagatgcttgcctagcatatacagggcccagagtttgagcctcagccctgcaaaaataaatttctcccaaatgtacactcctttgatgtattagaccttacctacgacttcactgcaccagacatgctattcctcaggtatgtgtgccacagccacctgtccccagcaacccaggcagcttcctgtcaccttcgctcctttttcaagtccacctctctaaactcttgccttccttcaaggcccccaagttgactccatctggggctcagcagggatttacacgtttgcatctgtctgtaaactctgcctctggagtctaacttgggctctctatccctttagggagttgtttccagtagaactgagtagagctatttgactctgactctgcagtaggaggtggagggggaagctgtggggtgaactggtgagcacaggcatcaggcagatggtggagatgtgatgattcaccttggtaacagccgaacctatctaggggagcatgtgagtctagccagcctgtctggcctaaaggcctttcatgataacggctcaagtttttatctaggctagtgaacttcctttccacttgaagttcaatcagtgcgatattcccactgggacaggtaagggggtgagggtctgtctcttcctccatgccaacaggtattgttttggtaaagtcttcagaggaggagaagatgggaggaagctagtgtggtataaatcaacagaaggtgtcaaacatttttgaagctcgacaagtgttaaagccactccccatacacaggagcttgggtacttctcctctccatcaaaccctagagagaagccttaggtagggttggctctggcctggtggaaagatgctgtcaaagggagctggcctagctaacacactgggaagagtgcattgtcagcgatgggatgaatggctccctcattcttggctacaaaaggcagcagaaaccctcatgtgtacccgcactgtgggtacacatgatgggcaacacacatcctatatagacatagacatatgcccaggtgggaccacactgctctgctgcatagacaggcactcaaacagaacacagacagcgtacacgcaagctctagggatgcatgtcccacgggaacggatgctgcctggaatgatgccagacataagctagggatgtatttagaaagcactgtgggctctgggccaggaggatgggaagctggtcctgctgttggaggttgggtgggaagaagaagtaagcgacgcaaagtgttcttcctgttgggatccacacaggctcctcttccctctacacaagactggggtctctccctgggacaggcaaaatgtctagccgtgtgtgtgtgtgtgtgtgtgtgtgtgtgtctgtgtgtgtctgtgtgtctgtgtgtctgtgtgtctgtgtctgtgtgtctctctctgtgtgtgatatgtgtgtgtgtttcttcgagttgtctagcaggcagcctgtgagggtttgctgactggatttctctgggagcaggctggggaacattccttaaggatgtaccctggattttcttctagaattcaggatgctttggatggggtgtggctggagaacactaacaatgcagagtccttcataagcagagatggggaacccaaattcaccaggtagaattattgcagggggcaagttagagctgggttggggtgtagccggtagtctctgttagctgggaagctgagtcgaacgagtcatttgagctcatgagtttgaaaccagcctagttagcatacttagaccctgactcaaacaccacacatatacacagagccacagacagacagacagacagacacacacacacacacacacacacacacacacacacacaccttccttgcgcgttcaggccgtcataggctttttctagatgaggtgaactctttttcaggtcagttggctctgttgaaaggtttggaaaatccctccctggaaaggcatttccaggtactatgaacgtaggaaataggaaaaagaagcctgaagcctatgggaactgtcttcaagggctgggaagggcctttggttcggaggagacagctagactccgatgtgagcctcacgtatagagcaggactgggcagaagctcccaagtagctccagtcgatggagggacaactttctaacaggcacagtgatccaccatctttgaactcatgtgcaagggaagagttcctgtgtcaggaaagtcacccctgcctctcgagtctgctgttcactgctgtcctggttgtctgtcacgccctgtgtggacagatttgagttgcttcctagcatggtctcagctcccctcccacagcagtctctgcttctcttgcccacaggcccaccctaatccccccctgaggagcctacagggcttcctgcccggtgtatgttcccccaggctcctctctgtggagcaatattgcaagctagacaagtgctcttccactgagctactgtgactgtgactgtgtgtgtgtgtatggggggggtattgtttgtgtgtgtgtttatggaggccagaggtagatattaggtgtcttctcccagcattctccatcttatctgttgagacagtctcactgaaccttaaactcactgattatgtagacttgctgaccactgagtgccagtatcccccctccctttaaatgaactttttttttttggtttttggtttttggtttttcgagatagggtgtttctctgtgtagctctggctgccctggaactcactttgtagaccaggctggccttgaactcagaaatccgcctgcctctgcctcccaagtgttaaatgaacttctttactttattttcacttcatgtgtactggtgttttgcctgcatatatgtctgtgcccatatgcatgagcctgcacataccagaagagagtgttggatcctatggaactggagttatataaggttgtaccatgtaggtgctaggaattgaactcaggacctctggaagagtatccggtgctcttaactgctgagcccttcctccagccctccagggatcctcttgtatgtgaacttgaatcctcatactttcatagcaaaagagcataactatttacttacttttgttttgttttgtgtgtttttaaaacagatgtagatttttttaaaaaaaatatttattttatgtatataagtacactgtagctgtcttcagacacaccagaagagggcatcagatcccattacagatgattgcgggccaccatgtggtagctgggaattgaactcag

SEQ ID NO: 2229 - DNA, 1519 bp, Mus musculus
gctcttctcaaaactcaatgatgatggccccaggaggcccagactccctaaatgccccttgtggccctgtgcccagctcctcccagatgatgtccttccctcctcggctgcagcaacctcacggtgccatggcccccaccggggccgggggcccaggcctgcagcagcactacccttcaggcatggccctgccccccgaggacctgcccacccagccaccgggtcccatacccccccagcagcacctaatgggcaaaggcatgactggccgcatgggcgacgcatacccacccggggtgctccctggggtggcatcggtactgaatgacccagagctgagtgaggtgatccggcccacccctaccggcattcctgagttcgacttatccaggatcatcccctctgagaaaccaagcagcaccctccagtacttccccaagagcgagaaccagccccccaaggcccagccccccaatctgcatctcatgaacctgcagaacatgatggcagagcagaccccgtctcgaccccccaacctcccgggccaacagggggtccagcgggggctcagcatgtccatgtgccaccctggacagatgtccttgctgggcaggacaggtgtgcccccacaacagggcatggtgccccatggcctgcaccagggggtcatgtcccctccacaaggcctcatgacccagcagaattttatgctgatgaagcagaggggtgtggggggcgaggtctacacccagcctccccacatgctctccccacagggctccctcatgggccccccaccccagcagaacctcatggtgtcccaccctctgcgtcagcgcagtgtgtctctggacagccagatgggctacctgccaacgccgggcagcatggccaatctacccttctagcaggcccctcggtctggggctggggaaactgaaaatatgttaactttaaaaagttttgtttttcctccagtgttgggatggatggcctgggtccaggggtagggtggcgggtgggaacgggcttgtgtggggagtggtgtttgtggaaacctgctgtgctggcagctgagggggaagcggcaagtgtcgggtgaggagttggaatcgggctctgctccatttctgtcactaggactgcgcctcctctgcccccccccccctttcccgtggagcttctgtctccctttgtctttgcacttccccgctttcagctatgttttgggggtccttggggagagaggagggtcttccatcctctgacccgtcgtggactgtcaccttgccggcggcgcttcaggtccgtttctcgccttcccgtctctctgcttttaccctgttttccttctgcctcatttcctttccctactgacgtggctgacctcctctcccacgccccctgcaggcagctggccaggtgggcaggtgccagcggagctgtaaatagagctgggcttttgtgccggtttgtgcgtgtgccgtatttctgtgtcttgatagaagtcacacacaag

SEQ ID NO: 2230 - protein, 301 aa, Mus musculus
SSQNSMMMAPGGPDSLNAPCGPVPSSSQMMSFPPRLQQPHGAMAPTGAGGPGLQQHYPSGMALPPEDLPTQPPGPIPPQQHLMGKGMTGRMGDAYPPGVLPGVASVLNDPELSEVIRPTPTGIPEFDLSRIIPSEKPSSTLQYFPKSENQPPKAQPPNLHLMNLQNMMAEQTPSRPPNLPGQQGVQRGLSMSMCHPGQMSLLGRTGVPPQQGMVPHGLHQGVMSPPQGLMTQQNFMLMKQRGVGGEVYTQPPHMLSPQGSLMGPPPQQNLMVSHPLRQRSVSLDSQMGYLPTPGSMANLPF

SEQ ID NO: 2231 - DNA, 35622 bp, Homo sapiens
  misc_feature (1)...(35622): n = A, C, G or T/U
ggcggttctgtttggcagttctgtgtgattggccgatgtcatgtgtgtttcctgagctcccctaggctgtctctatgaatacgggagcctctgtgggtctgaaggggccactcttggagaatttggagtgctttttaggaaacgtctttggatgtgcatctttgggagttgtgtctgtgttgtaagtgtccggggtacctctggagagtgtgtgtgctgggggcgtgtctcgtccacgtgtatgtgcgtgtgcgggcacacacatgcgcttcacttctcttccctcctctctcctccctgggaacatgtctggggtatgtagtcacaggtctccccacagctccctgggacatgcagtcctctgccctttgatagggaagtttcctggagtggggccaaggcttctggcagttccgtggtccttggagagagagtggtgcagtggagactttgtgataaactctccctggggactggggtctctccctctacccctcacggacacctagcaccttgtagggtcctcataccacctgtccacctcttcttgtcctgattatacagtggtggttgttacagagaggctcggtgttctaaaggaaaaggggtggggaaagggagctaagcccccactctggggtcacttgttcattgagggcaaggaacagccaatcacattggacttgggagcttggtggcaaatttaaggttcagaaaagttgacttctccagctagggtcaaatagctaaacaagagaagacactcatatttccagcctgagcagaagacggaggggtctggaatccaggcatctggggtggggccagctgcccttgtagccttgatcgatcgtgggaagtccttcttgatgtttaatctcattccctcctactgcacttagacagtattctacattagaggaggttcctagggttttttgatttggggccaaagcaaggacggtgatagcagagttagtgcatgggatgcaggcactagaacccccataaccttgctgcatctcagtttcccatcctgggatctcaggatgggaatggaatgcatttctccagaagcacttgtgacaaatcagtgaggaagcagagtgctggggccggggctgattgtgtgagtcagagacctatggagacagcagcaggaggtggacataaggataagctgtcccttttacgtccccacccccagtggcctctggtcccagagcacagtgggaggaagggaggggtacaggttggtacagtgctcagtgacccagcagggggagggcctgggcaaggaattttcagcttgtttctcaatctctgtctctgagacacgcacacacgtcactgcagacacctttaggagatgagctcagaaaagtcacctaggtggcggcagggcagggcagtgccagacggggccatgtggaaccagccttatgctggtagatgccctgctctgtatgagccttagaatggaaagttgagcccagccgaaggtctcctccccagcagaccccatctcaggtctgggaggaacacaggctggagagggttaagtctggttggcagggacaccccccgcccagtgcagtgagagagagggaggggtggttagcagcttgctctagttggcgtctctcccagaattcttcggaaaagaactcccctttgaccccccagtacaaactgagcccagccaccagcctctctcccgcctgctgtgggagcttcgcccagccccctcctactgaattgctaaaccgactccctcggcccaggtcctcccaaccagaccaggtcctcaggacttggcctcttcagggaaccagggctatagccagggagaccacacagggacatagaatacacagccattcttttccctgacataggataacctggaggtggctggtgctagaatctggggtcctccaacctccccnnnnnnnnnnnnnnnnnnnnnnnnnnnnnnnnnnnnnnnnnnnnnnnnnnnnnnnnnnnnnnnnnnnnnnnnnnnnnnnnnnnnnnnnnnnnnnnnnnnnnnnnnnnnnnnnnnnnnnnnnnnnnnnnnnnnnnnnnnnnnnnnnnnnnnnnnnnnnnnnnnnnnnnnnnnnnnnnnnnnnnnnnnnnnnnnnnnnnnnnnnnnnnnnnnnnnnnnnnnnnnnnnnnnnnnnnnnnnnnnnnnnnnnnnnnnnnnnnnnnnnnnnnnnnnnnnnnnnnncacagaagtctggtgggggtggggggtggcaattgagtagctcagagacttcctggagctgcaggctgtgtggactgtgtgtacatgtttctgtggtgtgttcgtggggggtgctggggtgatgggaggagcggggacatagattgctagaagggggcttctagctttgaccctctctccacagggagcccccaacccagaccacacccttgagcctgagcccgacattattcctgaggtgagaggtctgtgtgcccctgtgtgtccctctcagcctccctgatttctgtccgcggcggccgcgtcaccctggcttagcctcctgcttggcgttttgtcttttgggctcccttctcttggctttctgcccccatctctcctttcattcccctccctccagaggagggaggtctcctctggctcctggtgggcaaacaggctgaccagaaccctagacccagtcaggtggggagtggggccgggctgggaggggttagagccaggctccagtgagagtccagcccttctctatctcagcggatctcaccccccacccgccccaccctgcgggaggcaaggagattccgcccaatcgccctggagggcaaggtacaacttcctggttatcccaagtccttgctcctcctcgctggcttggcctcttctggctcagtcaaagccagggtggctaccagccacagtagtgtggtttctgccctggcccctggtcccctagcgtacacatgcgtgcgtgtacacacacagacacacagacacagacacacacacacacacacacagcctcttccctccgccagccccccttccttacttagcaacaactccctgaattcacaacaaacacgcctgagggctcccggttcgactagggaaagctggaggaagctggggactgggaggaggcacttctcctagaccatccccaggagggaggggcttctcatcccctcacctcagccccgaacctctccactgaagccaccccccaagggacaccaaggaagtggtcctgctctctactgaggaatgaaagagatggggagcattggccaggtgtggctgaacaggtgggtggggggcagggctgggactccaccctcaccggtgagtcccacttgacctttgacccccacctggggcctctcacgagcccgtggtaactcttggcaggggctctgtgctgttgtctcggtgactagccttgtgccctcctctgaccggcagggacaaggatgggtgaggaagtaacggactggagttgggcggggctgggggaggctggagaactttgctctgtcctggcaccacaggccaggccaggcgggtacctgggttgagggagtggggagcggtgctctctctctgatcttccctgggcaagccccgggcacatcaggcatggagggaggatgtgaggagtgagagggtggggcctggacacccatgctttctttcgtcatcgttcagaggactgatactgtggtgcatctggagtattgtgaaatggcccagaacccagatgccagggtgtctgaattcaaatcctgcttcttctaaaattatgggccttaggcgagttatttaacttctcggcatgtcccttttcttagtgggaaagtgaggataataagaatactttcttaccagattgttctgaggattaaactagaggatgcacgtgaagcatttaggactggtgaagttacaaagtaaatgctcaataaatgttggtgatcctcccctcatttgattagtcagagctcttcacaggaacttttgatcctcccaggggttttagcagggaaagaattgatggtgagagagggagtgtgggggtggggaagagacagcctttccacactccagattcctggattctaatacccctccagatccactgtttgctgccgccgcttccccatcgttggtgcctgctgacttcttgattgcaagtttgccaaatagccaggggcctggagaaggcccagggagcttaggacacgtctccctcgctatcttcaggcttcccagggccagccctcctccctgaggctgtttgctcagttcagctcagcactcctcccactgccccatcccctgctgctctgctctcaccaggcaaacaagacattccgtccttaaatggcttaaatggccgcctcctctccttcctggcctaggggtcagggacctggcttggggagagaagtgtcagtgtggagctgtgacctggatggcagctgttaggaacacctcagggccctggaccccggattccctgtgccgtgcctgggcatttctctgaggggcagtgcccagacctatgatcatgtgggggagccccgatgggcctgtctgtcacctgctggacacagatggtcagggagggggcatcctgaagcccagaaggggagtggggtaatatcagcatctacagcgtccaagggacacctccagagtccttccctgagctgcaagggggagtgtggacagtgctaggaaaagttctgccttaaccctgtgtgctggcaagggagaatgctgagtggggccaggtggccagggctcctataggccctggggtgagagtgggatggtggaggggctgaggcttgggaacttctggatgaggagcccaggagtgggcggcagggatggggtgcccacaatgaggtggggaagctatgcagacaaggtgggtaaaatcttctggggactaagatgtggtagaagtgcctaggatcccagggcccctgggtctgaggcctggacttagctagcaggtgctctctctggcttggtaccaagaggggtgggctggagcccctggctctgcttatcatgttcctctggatctagagaggacacctcccatccatgggcctgggggatgagggctcagggtctgcctgggccatgccttgctactggactggccatgcctcctgtgcccagcccctggggcctgttccttgggcaggctggggctatttttgggatcgggctggggctctggggccggtttcagatgttccaatgtgaacacgagaaaatgggaacagatggctggagggttccgatcagtgggtcctgctgggcgcaggttatttttagggccttgttaaccctttgggggcttctggggccaccctgagagatacagccctgtctagttgagaagagaacaggttttctccctgggccccctactttccagaactgcttgtcagttgttctttctctcccagacccttcctttgagatccatggcaagagagtaggcttaagctttctcccagcccaagtactacagggtgactgccaaggggcaggcagggagaaggggacctggcagaggggaggctggctctcttgaagggaaatcccccttcacttgcctcctggacttttgagacatggtcctgaggctaagagagtggacagccacccagcccctctctgggttcatgctctggatttgagtgtgtcggtgagcccaggatgcccaggagtgtgccagcggagggagctgacctctgagaggagggcaggggaggagccaagtctttttacttggtaccactaatatgatgcccacaggccctgttctcttggacactcacagggaaaatatctggacagtgcctgcctttaccaaatgcccacatatttgggtgccatggcaggaggtagagataaggaaattgaggccagaagtggtttgtcaagggctggtgtgtcttaggcattctgttagtttcactactgttacctcactctataaaattattctccttttgcagatgaggaagctgaggctcagagggataaagggaaggacaaggccccatagatgagaaggggcagggtgtgattgacactgtctgactacaaacttggtttttttttttgagacagtctcgctctgttgcccaggctggagtgcagtggtgcgtctcagctcactgcaacctccgcctcctgggttcaagcaattctctgcctcagcctcctgagtagctaggattacaggcgcccaccaccatgtctggataatttttgtgtttgtagtagagacagggtttcaccatcatggccaggctggtcttgaactcctgacctcgtgatccacctgccttgacctcctaaagtgctgggattacaggcgtgtgccaccgcgcccggccctcaaactcagttcttattccactgcatcatactgcctgccagggccccaacctcagagggcgaggccaccaggcaccagacctcctctgggagcagctttactgaatgggtgtgggagaggaggcctggggacaggggaccctgcctgtcactgctctcacaatcccctaagcctttcttgcctgagggtgccaggactgacaccagaaaccccgtgtggccttcctgtctcccctgcagaggatcacaggcatacatcctgtctcatcacccccacccctcccggcctggcccacgtgcccctgcatcctggagggtcatgacagtctggatgtcaatgtgggcagagctcgtggggcccccaggtgctgctgctgccaagagtgtgagccatcaggggaggtgaggggccaggaggatgcctctgcctctggctgtacctggggagagagcagagcaggcaggcaggcgggcgggcgctgggtgaggtcccaccgtggtgcgcttggctgtgccagcagtctgctgcactccatcctcccacaatggccccattgttcccagcagccaggcagtttggaggaggttcctcggccacccctacccccctaaataggggacagattaaccccttggaggactgaggccaggtgagggcccacagggagctgccttgcccatctctgcctgttctgggaacccaggcttgggaagttaccttctacccatgtgaacccagcaccacaccacctcctgagatgggagtctccatagggtagagagtggcacctggatcatctcctacccccaccctggtgcaggtgccaggggacaggaagtaccagtggggcggcgggcagagaccagatatatttgggccggtggggctaattccagccaccactgcctgccctactggctcctgagctcctttccttcctgtgaaaccagagctaggttgggcctagctcaggatttcggtggatttaaagaggcagcaccatccctgccagcctggctccctctaccctccccaggtagggtctggggcagagagaggactggagagcttcttgctcctcccttgccctgggctaacccctggcccttgcctctgttggggtaccaagcttttggcactcctctctcccagagccttgggcgggtggggtgggcgggggtgggctgtggtttcctgtgttggttgtttgtgcctggcccagagtgcccgccgcctgcctgggcttcctgccctgtcttgtttccttgtgccccccaccccctctctacccctccccctgtgggagggagcagctggggattgggtagctgtctttgggggcaccccactgccaggccatgattgcttcccaaggcccggccacactgacaatgactgtaggagccaagagaagtgaggtgacctcaggcctgtccaagcaatgccacttgtctgtgcaggctccagaagggacagtgggccagaatgggcaaaaccgccgatcaccccccagtaccctgttcaacaatcccagactagaaaggtctgggaccaggagtttccctggtcctgtggagctggggttgtctgacattaccctagggctgcaggtggggtggggctggaaactcccagggaaaacctcccaagcaaaaatggctgatttgcatggtctcctttggcacagagtcgggggaagtgtggagagctactaggaaccagggccatgggaaggccccctaagcctggaagtccccacatcgagggtcccagagcagcaccttggtccttgagcagatttcctgctgggctacgaatccttgacctccctgcccgctgagtcaccacctcaggaagaggaagtgacctgagtggtggagagagcttctgaggactgaggggtcctgacacccaggagaaaggggatttgggaccctgtcgtctcgggcgctgtatctccctgagccagaggccaaggatctcgttcgccctgttgtccccagcagggtcctgggctttcacgtcatcacagggggccctggcagctcaggagcatgaaccctccaaaacatttcctcactgcctctttggggtggttttgagctaggcagtgacactgctgggccagctggtgagccaagcagaggctcccaacgtgggggcagctaggagcaggcaggttgccactggatgtgtgaacgcctgccctacctgtggtagttgtgtgtggagcagagccggtgtgtcatacctggaggctctgggcatctgagccttcctcagctccctcccccagctaggatcaagtccactttaacccttagcaacccttaggctgctagctcctaccctcgcgtcactcggggtgggggagcggatggatatctcaggccctttgtcaagccgcctcttccgctcctccgattcattctcctggtatgcgcctggccttccactcaggtgactcgcacctgctccctgtttgtgagcttgctacccctccccacctaaccccctaagagggaggcacggtgacgtgttcccagagccccatccctttgctttctcgtacctcaagggcccctggcctggtactagcaagcccccttcactgggtgctttaaaattgcattgggctgggatcagccctcttggcttcccatcaccaggccttccaggtgtcttcggagactgtgagtgtgtggaggaggaggggtcttcgggagctggggcagactcttgaggggcaaaggggggaggtgtgagatgggaaagtcctgactcatccacgcttgactcagctcgccctgcggcggggtgggagagagggggtggagtcccggaggggagggtgactggaagagtcttctggggaggagcctaggcctgaacggccactggagaggactgattttctaatagccccttcccaaattcttacaggttctcaatttttgaggctgtgaacataggtagtgagtggcccttgccctgcccctccccccttatgggggacctgggcactgtggctggaatgtgggaagcccaactatctgatgcaggctcagaggagcagtcatggctggcgtggggaggtggggtcactgcagtgtctggaatgagggtccgtccccacactgccacatactggatatgtgactcaaggtcacgccacttccttttcccagacctcagtttcctcgttgaaatggggtcgatccttttgagaatcagcgagctggtgaagggagagcctgagatgcatgccagccaggagcctgctcagagccctggtatctcagtgactccagcctctgcctctgctcttccctggttgtgatggagaagctgggggtggcgggctgcttcccaggcaggtcctggactttggaaccttcccccaggagccttcctccccagagacacggctggagtggcgaaggccaatgtgccctagggttaagttggggttagactcccgcagggtggcaggtggggccccctcacccccaggtccccgcccagcctccagcagccccgcagggagcatcaggagtgtgcaccggtgtctggccgggcctgtcaccgggacgaagctcctgggcccaagactcctcccctttgaccgggatcggctgctggagggctgctggagggcgggtaggggaggcgaggggggagccagggctgggggcggttgggtgaggcctctgtgtttgtgtaagtctgttgctgtatctatggccctgtgcgtgtttctttgtgactaccaggctcaactttcttcggctctcttgtggccggcctcagtcttttcatctgttcaatgggtccggcgctcccactcagccctcgggcagccccggtgtctgcgcgtgccccaggctgtctccgcgcctcccgctccggccggcgcttccctggcctccggcgcgcctctagcttcctgggctccgtgcgtgtctttgtctccctgtccacgtgtgagctgtgagtgtgtgtgagtcagagttcgggtgtctgtgggtctctgagcctctgctggcagcacccggggctcgccaagctcttgccggctggcgcgcgcccagcccctggcgggacttgtccgtgtgtctgtccgcgcgcggggcctggagaagcacgctgcagtcctgtccgcctcccgctcgctgcctcgctggctgtcgctcgctcgctctgcctctccgcccgggctctgccgaagggggcggggtgggggtgcagggcggggggaggggaggctcctgcattcttgcggtcggggaggaatccgagccagcgttactggtctccagaagagcccagctgcagccccggggccccgccaggcctctcgctgcccgcccgggcctgctgggatgggcacgggctaggcctcgagctggggacggggcggggcgtggccccaaccccgggccccctccacggctggagcgctctgggggtggggcacgaggggtaccccaccctgggtgaggggcgcgtctgggagcaggaatccctcagggggccaggggagacctcacagccgccccacacggcacctttgctacctagccttttagtgaattctgtctctgccgcccgtcggggcggaggcttgctggagactgcaagccccctgagggcaaggtgcgggagggatggggacagggctggcctccaggatcgagaccccatctcgtaatcctctttttccagtgccaccccaccctatccagctccctagtcccagggctgttgggtcctcccttctcccctccccctctgacaccccctccccaagtcacgagttttctctttggggcttgttgctgcagtccgtgctccagtaccgagtacctggctgggccctgggcacgcacaggggccgtagccccactgtgtgtgggagccatgaggatcctggctaacaagacaaggtgtgtgggtgtcgtggcgggtgggatgtgtgtgtgtggagtgcgggaagggaagggcccagtggtgatggggcccaagctgtgctggccaggagaggagccgccctgggcacctggctcccaggccaccagtgggctaaaggggggttagcatgggaaggcctggcccgaggcaggaggcgcagccagccttagtgcctgggcctgggtggggggcagaggggactggcagccagctatgcttgcggcttctggtcccttctagttcttccctccttaaaatggtttgagcagaccccctcccaccctactgtggggtccgaaggccgcctctggcctcagtctagctggaggtgggagctggagtagggggcggtgcctgcctccctcccccctccccggagaagccggcagacagggccaggcggcagcagcaggacagcagagctgaaataaatctgagctggtgtggaatgaggggggataaatatcctctcccgtgatgtgatctttccagcggctattaataggtctccggggagggggaggcggcggggggagcgggctggagcttaaagggcccgcagcctaggctgcaggaatccttggcttcaagctacactccccatctgcttgacacaccgctcccctccccctttcctcctgcttctgcctgccggcctggcctgccaagcccccctcctcaggccttcccctccagctgtctggaccagtgggtagcactccctggtgtgcgttttcccactgtccctggggaatgagacccgggcatgtgcagtgaccccaggtcctgtggcccttctctgctggtgttgggacatatgggagttgaggtttgagaccttggaaggagtctgaagacagcagatcttagaagagaggatgcttaagtctgatacagaggacagggttgccacagaagcttgcaggctgatgggtgttttggggctgaggtgggtgaattctgccaactctaggccctggtttccattcaaattgtggaggctagggggtggagggtttccccatctccactccccaaggtggatgagggcttcagcccttgtctgaggaagccatggagggaggtagagaatagctggtggtggtcttgagataccaccccttccccccaccctcccccattgttaggggaggcaggatggggtaattaagttgcaggcatgcctagcccctagcaaggttaacttttcacatttctcccacctcctcccaggttaccccaccccaggaggagagaagctccagggagcccgccgctgtccccccgcggtcattgcccccctgccccagccaagccaatgcacccagaaaataaattgaccaatcatggcaagacagggaatggcggggcccaatctcagcaccagaatgtgaaccaaggacccacctgcaacgtgggctcgaagggcgtgggggcggggaaccatggggccaaggccaaccagatctcgcctagcaactcaagtctgaagaacccccaggcaggggtgccccctttcagctcgctcaagggcaaggtgaagagggaccggagtgtgtctgtggactctggagagcagcgagaggctgggaccccatccctggattcagaggccaaaggtaccccatttcctcatccctaagaccctagcatctcccatagtccaaggctcagatgttctgggagatcacctctctgctccctgcttgtccagtcctcatcccacgttcttctccagtatttctgcatgggtacctttcaacacccaccaaccagatcattcgggattggggttggccatgatgccacccatggaggggccacacagagtggtcggacttctggactccttcccctcctgctttcccaccagagctccagaaggggagagggaggtgccatggagtgaggagcagaccccagacccacacacttccaggagcctccgtatcccggctggtgggagccctttgggagcaggcactggggcctggaagagtagcagcagctccccctcccctccagccctaattagaaccagttgtggttggggattatgctgtacttggtgttgggggggaggggagacaggcatggggctatagagagaaatcagaaacaaatggtggcgtggtgggggccacgggctggcgaagtgcccaccatggcctgggcagtgccctctagggtggggcatcttagagaatggatctgggagggaccctgggtgtgggagaataatggggcctctaggcactcactctttcctccgtcctgcctgggcagaggtggcgccgcggagtaagcggcgctgtgtgctggagcggaagcagccgtacagtggggacgaatggtgctctggaccggacagtgaggaggacgacaagcccattggggccacccacagtgagtgcctgtcgatgccagggtgctgtagcccgtgatgttcctgggggatggacttgagaggactgagcctgggaaagaagtgaggactgggagtcctggatttttctctcccatcctacctctcagactctgtccctccctacactgcaactgcctcgcctctgccttccaggtgctcagtgaccccctctccctagggaccctaggtggggcagagtggagtggcctccttcttggtcacgtcacctgcacctctacctgtgaattcctggcctatgctgccacctactggttagtggagggagggcggtgaagcgtccagggacactgggagccgggcagttggctctgctgtgcaaagccctgctaagcctgggtgtgagttgccacttggccgtgtctctagtgcccttccctaacctctaattgactcctggcaagtacccagggtgtgtcaccaggacaagaagtgggtgtggagggatgcccactcctcctctgattcttttatggattcgcctatatcttgtccttccatgagtgatgggggagagccagatgtaacccctgcccctgggaagcttgtacatattttttttccctcaaagtttacgtttacatctttttgaggagagagacataagaaactagccagagaggctgggtgtggtggctgtcacctgtaatccccagaatttggggagctgaaaccggagaattgcttgagcccaggagttcaagaacagcctggccaacatagggagaccccatctctaaaaagagagagagagagaaagaaaggaaagaagtaaagaaagaagaaaaagaaactagccagagactattaaattgtgaactccttgaaggcagggaccatagaaagaagaaagaaaagagtacattggctactttgctactctgttttatttaatccttacaacagccctgtgaggtcagtgttatcatgatgccaattacagaggaggagagagagtcagcaaatgttatggagtgagcagactatgtctgtgacaggggtgtagagggtcaaataccaaacctctacagctagctggaacctcacagaccatcctgtatcagttctctctcccccgtgggactaacctggtggtcgccaagcctctggctgaaccctttgatgatagaagcctttactgcttcccagaccagacacctccccccatagccaccacctccagttcacttatgtcacatcagactgcaccattgtagaaactttgtgagttttatttatttattgtttagagacagggtctctctctgacacccaggctggagtgcagtggtgtgatcacagctcactgcaacctcaaactcctgagctcaagtgatcctcccatctcagactcccaagtagctggggctcaggcatgtatcacacctggctaatttttgtagagacagtcttgccatgttgcccaggctgatcttgaactcctggtctcaagcgatcctcatgccttggcctcccaaagtgctggaattacaggagtgagccactgtgcctggcaaacatagggaaatacaaagtagaaattgctaacatcccatactcaaggcgactattttagtcgtactacccttagattcttttatttatttatttatttatttatttttgaatcggagtttcactcttgttgcccaggctggagtgcaatggcacgaactcggcttactgcaacctctgcctcctgagttcaagcgattttcctgcctcagcctcccgagtagctgggattacaggcacctgccaccacgcctggctaatttttgtatttttagcagaggtggagttttagcatgttggccagaccggtcctgaactcctgacctcaggtgatacacctgcctcagccccccaaagtgctgggattacaggcgtgagccacccggcctgattctttttttttttttttttttttgagacagagtctcactcactctgttgcccaggctggagtgcagtggcacaatctcggctcactgcaacctccacctcctgggttcaagtaattctcctgcttcagcctcccaagtagctgggattacaggcatgcgtcaccacgcctggctaatttttgtatttttagtagagatggagtttcaccattatggccaggctggtcttgaactcctgccctcaagtgatccgcccgcctcggcctcccaaagtgttaggattacaggcataagccaccgtgcccggcctgcccttagattcttgaagagttcttactggaggggcgatagaacgtagacattgacaggactagttctgccatcaggctgccttcgtttgcaacccaggttatttctgtaaatttgggaaagggcctcagtttcctcatctgtaaaagtattatttatctcatagggttggtatgaggagtaaatgaggttatacatgtaacatgttagcttttatcattgttattgtactagaaagttccttgttggactaagccctgcctgtctccccatagctcgtatccaagagctactcagcagccttcacacattgaggtcagctctcaagctcccccgcaaatttctggctctgctcttctatgtaaaattggatagatagggtccagagcagggccgttttggggtgggtccatcagagaagaaggtgcagaagaaactttttccaaagagggcagcctgacactgggcccatgggaaggtggtcactgccctggctggatggagacaacttcaggcaatctgtctcccattaactgagaatgctggtacttactgtctgcgggccaggaactgtgacttgcttttcttggcatgcgaatgggtctacccactcacctagacccgttgtagatttttttctacgctaagacttacagtcaagtgtctaaccatggaacaaaacttcccttggtgctgagggcagctggtctgtcttgagagtgtttccagtatgtcagctttttctaactgttttttctttcttatttttatttatttatttatttttttgagacagtctcgctctgtcgccctggctagagtgcaatggtgtgatctcggctcactgcaacttccacctcctaagttcaagcaattctcatgtctcagcctcctgagtagcgggattacagccatgcgccaccatgcccagttaatttttgtatttttagtagagacggggtttcaccatgttggccaggctggtcttgaactcatgacctcaggtgatccgcccgcctctaccgcccaaactgctgggattacaggcgtgagacaccgctcccggctctctgtttttcaaatggatttttttagtctgtgacattgatttaaacttactgttaaaaaatatatttctttggcctgccccctgtgcaaggaggaggttagtattttacattttatagatgaagaaaccgaggcttagagggatgtctggttcataaaatcacaaagtcagttagtggtggggctagagtgaaaaaccatccatcatttggatcatcagcttgtgtaccctctctgccttctccctaactgggtcactagactgtgtgcacatacacttacccagtgagaggggcagcagctcagagcggagcttcagagtcccggccctgggttcagttctggctctgcactaactggctgtgtaactgtgggtgaggaacttatttcctcctttgttaagtggagtgtgtgacacgttcctcccagggtgtgttgatgagatgaaatcacacctgttaagtccccagcagaatgccaggcccatgggagcctgtggagaggacacattttctctgtccctgctctccacatggtcaccactcttgccatcgtggaaaccagcctggtgagaacaccagatactgacatcaaatgtccctgtgggcacgagctgtaaggctgtgagcatcagtgggagggggcatcagctggtccttcttgtatctagaccacttagcccctttccctgtcctctctcctgcagattgtaatgtagcagacccagccatggcggccccacagctgggtcccggccaaaccacccaactgcccctcagcgagagcagcgtgccaggcgccccgcacggccctcctcctggccttcggcctgatgcccctgggggcgggggcgggggcgggggcgtccccggaaagcctccctcgcagttcgtatatgtcttcaccacccacctggccaacacgtaagtgcctggtgggcaggccaagtctctctctctctctgcccagcacctctcagcctggggttccgagggagccccgtgcaggggcagggtggggtgggtgagggtggggctccctcctgctcacctctctgagctgtcggtgcccccactctgtgcagggctgcagaggcagtgctgcagggccgggccgactccatcctcgcctaccaccagcagaacgtgccccgggccaagcttgaccaggtgagcgtggcgcctctgtgagcagcaggactgggtggaacgtccccttacctgtctcatgctctctttgtccttctgcaggcccctaaagtgccccccaccccagaaccgctacccctgagcacgccgtcagcaggcaccccgcagtcccagccacctccactgccgccgccgccacccccggcccctggcagtgccccgcctgctctgcccccagaggggcctcctgaggacagcagtcaggacctggcccccaactcggtgggagctgccagcacaggtggtgggactgggggcacccaccctaacaccccgacggctaccaccgccaacaaccctctgcctcctggaggagaccccagcagtgcccccggccctgccctgctgggggaggcagccgcccctggaaatgggcagcgcagcctggtgggctcagagggcttgtccaaagagcagctggagcatcgggaacggtccctccagacgctgcgagacattgagcgactgctgctccgcagcggagagactgagcccttcctcaaggggcccccaggaggagcgggtgaggggggcccaccagcacaagccccccctcccccccagcagccacccacggcccctcccagcgggctgaagaaatatgaggaacccttgcagtccatgatttcacagacacagagcctagggggccccccgctggagcatgaagtgcctgggcaccccccgggtggggacatggggcagcagatgaacatgatgatacagaggctgggccaggacagcctcacgcctgagcaggtggcctggcgcaagctgcaggaggagtactacgaagagaaacggcggaaagaggaacagattgggctgcatgggagccgtcctctgcaggacatgatgggcatggggggcatgatggtgagggggcccccgcctccttaccacagcaagcctggggatcagtggccacctggaatgggtgcgcagctgcgggggcccatggatgttcaagatcccatgcagctccggggcggacctccctttcctgggccccgtttcccaggcaaccagatacaacgggtacctgggtttgggggcatgcagagtatgcccatggaggtgcccatgaatgccatgcagaggcccgtgagaccaggcatgggctggaccgaagacttgccccctatggggggacccagcaattttgcccagaacaccatgccctacccaggtgggcagggtgaggcggagcgattcatgactccccgggtccgtgaggagctgctgcggcaccagctgctggagaagcggtcgatgggcatgcagcgccccctgggcatggcaggcagtggcatgggacagagcatggagatggagcggatgatgcaggcgcaccgacagatggatcctgccatgtttcccgggcagatggctggtggtgagggcctggcgggcactcccatgggcatggagtttggtggaggccggggcctcctgagccctcccatggggcagtctgggctgagggaggtggacccacccatggggccaggcaacctcaacatgaacatgaatgtcaacatgaacatgaacatgaacctgaacgtgcagatgaccccgcagcagcagatgctgatgtcgcagaagatgcggggccctggggacttgatggggccccagggcctcagtcctgaggagatggcccgggttcgggcccagaacagcagtggcgtgatgggcggcccgcagaagatgctgatgccttcacagtttcccaaccagggccagcagggattctctggaggccagggaccctaccaagccatgtcccaggacatgggcaatacccaagacatgttcagccctgatcagagctcaatgcccatgagcaacgtgggcaccacccggctcagccacatgcctctgccccctgcgtccaatcctcctgggaccgtgcattcagccccaaaccgggggctaggcaggcggccttcggacctcaccatcagtattaatcagatgggctcaccgggcatggggcacttgaagtcgcccacccttagccaggtgcactcacccctggtcacctcgccctctgccaacctcaagtcaccccagactccctcacagatggtgcccttgccttctgccaacccgccaggacctctcaagtcgccccaggtcctcggctcctccctcagtgtccgttcacccactggctcgcccagcaggctcaagtctccttccatggcggtgccttctccaggctgggttgcctcacctaagacggccatgcccagcccgggggtctcccagaacaagcagccgcctctcaacatgaactcttccaccaccctgagcaacatggaacagggtgagtcaattgcgcaggcaggcaggcaggcaggcaggcaggcgctgagcagtgtgtccatgctggggctgggcagtgagtgagtaagggcctgtgtaccacgggcccagaggtggatggctctgcttatggggcagatgatgacatttgtgggctttctcagggggtaccacgtgagtctcccaggcattttgagtgatcgtacttggggcctgggatcttccccttgcctggggccctgaggctgcaggaattgcttgaagactggtgggctctggagatagtgggggcctgtgggtgtgtctgaaggaccaggtgatttggggaactgaccgcttcctaaacctccccatatccacagccaaactcatctgcccctccccagtcacccctgctctctttgtctccccgtttctgtaggtaccctcccgcctagcggcccccggagcagctcctcagcacctcccgccaaccctcccagcggcctcatgaaccccagcctaccattcacttcctccccagaccccacaccttcccagaaccccctgtcactgatgatgacccagatgtccaagtacgccatgcccagctccaccccgctctaccacaatgccatcaagaccatcgccacctcagacgacgagctgctgcccgaccggcccctgctgccccccccaccaccaccgcagggctccgggccaggtgcgaggacaggccagggccccagggaggccagctggtgtgggcactgggagcggggagcacagctgtggttgtgctggcttttttgtgcctctgaaggccctgggtgtgggggtggaggctccgggatgctgttcccactcgctggagtcattagggaaacccagcccagagcactcgagtggtctttccaacacctggtggtgtgtctggcgaactgggccagaacttggtctcttggcttctagcatcaatgcctccagtcccttccctcccagccaggggaagccagtggtgaagactttgacctctggcaccccctggcttgggagtggggaaggcctgagccctgcaccctccccgagctgggcacaccgtgcctgaccccctgtcttctattccctacagggatcagcaacagccagcccagccagatgcacctgaactcagccgctgcccagagccctatgggcatgaacctgccaggccagcagcccctgtcccatgagcccccgcccgccatgctgccctcccccacccctctgggctccaacattccactgcatcccaacgcacaggggacaggggggccccctcaaaactccatgatgatggccccagggggccccgactccctgaatgccccctgtggcccagtgcccagctcctcccagatgatgcccttcccccctcggctgcagcagccccatggtgccatggcccccactgggggtgggggcggggggcctggcctgcagcagcactacccgtcaggcatggccctgcctcccgaggacctgcccaaccagccgccaggccccatgcctccccagcagcacctgatgggcaaagccatggctgggcgcatgggcgacgcatacccaccgggtgtgctccctggggtggcatcagtgctgaacgaccccgagctgagcgaggtgatccggcccaccccaacggggatccccgagttcgacttgtcgaggatcatcccctctgagaagccaagcagcaccctccagtacttccccaagagcgagaaccagccccccaaggctcagccccctaatctgcatctcatgaacctgcagaacatgatggcggagcagactccctctcggcctcccaacctcccaggccagcagggcgtccagcgggggctcaacatgtccatgtgccaccctggacagatgtccttgctgggcaggacaggcgtgcccccacagcaggggatggtgccccatggcctgcaccagggggtcatgtcccctccacaaggcctcatgacccagcagaatttcatgctgatgaagcagcggggcgtggggggcgaggtctacagccagccgccccacatgctctccccgcagggctccctcatgggccccccgccccagcagaacctcatggtgtcccacccccttcggcagcgcagtgtgtccctggacagccagatgggctacctcccggcaccaggcggcatggccaacctgcccttctagaagtcgctgccagggctggagccggggcaatgttgcaaatacgataaccttaacaaagttcttcccctcaatgttgggatggcctgggtcgtggggtggggtggagggggtgggagggggcttgtgtagggagtggcatttgtggaaaccagatgtgctggcagcttagggggaagtggcagtgtggggtgggggattttgcattggggttggttccatttcggccaccaggactgcccctcccccactcctcccaattcctatggagcctctctattttacctctttccgtgcatccctgcacccgccacacccccttcagctatgcttttggagtcctggatgggaatctggggggagagaggaaggacaggtcaggtctcccccagccccttctgctcctgtctcctcgtgtccgcattgctggagctccacctccctcttggtttctccgcacccgcccattttccttctgtctttacctgcttcgtatcctttccctgctgatgtggctgacccctctcccacccctccctgcaggcggctggccaggtgggcaggtgccagccggagctgtaaatagagcgctgcgcttttgtgctggtttgtgcgtgtgctgtatttctgtgttttgatagaagtcacacaaaaaaaaaaggataaaagaaacccttccccccttcttcaagttattgctccctccattcccctggacccagggacatgcagccctacatggccacccactgtttgcagtgtctctgggtccctaagggataccattcctgtctcgtccccaaatggtaagatgacgtaaatgacccactcctaaactgaggtcagaccacctaggcttccacctggtgagccctagcagggctgagacccccagggcggcagcctgtctgctgctgagtgattcagggagaacatgtgtgcacgtgcatgtgtgtttgcccacaccggtgacacggggccctggctttccactttggatgcccgggcatccgctgctgctacatcttagccagaacttgaagtcttttgtcccagtttgggatgaaggaaaggaggaagaggcggtggctgtgtggcccccttgagtggagccatggaaggggtggcatggtgccactggggcctgtggctgtagtagccctgggccaggtaacctccagggccctgacttttccagaggctgctgccacctacttcttatcaaagaagggggagaacagttcatctgagtcagtgcacctcccctccagtctccactccctgaggatggaatcggggaaacagcatcctgccgcctcctctctgcctgcccactcaccggcaaggttgtccctctgcccagggctcagggccatgtaccagatctgtctgtgcccacccaggcacagccactgcctcccccttggctccctgctcctacccaggagagctccctatccgcctttggtcagagctgaagccatatacgactgggtgtttgtccccctactttggccccaggagtaaaaaaacttctccttttctcacttcctttcctgcctcgggaggtggcagggcagttccctggctgaggccttttgcgccccacctccaggaccaagggccattctagacagggtgtcttctaccaggacccgtccctagccttcctggcctggagggcctggtcttgcactggcagctgtaatacaaagggaactcgccccacttctcccagcctggtgctgtcctctcggcccaccatcggccaggtccagcgcttcctctggggctgacaacaggcccctgactcaccccggtcacctcccagggtccatggccagggcctctgtgtttggggggccacttgcccttcatcctgccaggcgctttgcccgccctgcctcagcctgggccctgtgcccttgagccctccacccctggcccaagacccccccaaactgtctgactctgtgtttcctgccctgaggagagaggggtcagattgcagcgggccgagtgccctctccgtcccctctcctcccacccacgccacaggccagcctactcttccctccatccatggccacacccccagccattttgtaccattatataaatatatatataaatataaatatataaatacaatatgtgaagacatcttcttggtttttattttgaaacaatttttaggcttgttccgggggtctctgtgctgcctgtactgtattgacctgttttataggtgcctttttattaaaaagaaaattcaaaatccagcctcttgcctctttgcatctgcttcagactcccccatcgattacccagcttgcgaggagatactcagagaaaaaagggacgtcttagggcttcctcgttgtcctgccgtgaagacactctcacgtgagccacagctgttatttccccagtggggcctcccaaggagcttggctgcttggcttgagtgggacaagggcaggggtccctgactccccacctgatcaaaggctggggaggtggtagggagcacccagaactgccggacgggcctcccacaccccaggtgagcaaacaagcacggagcagcttcctgcggttccatctgagtgacatcctcacgggggcagggcacggcttcctggggcctggggacttccctgcctcagtgtgtttcttacacttccctgcctaaggtgatgccacggaggggatggttgagatgactcccacgggccccttccagtccacctttctccgttccgactctgagtttcctcgggtctatagcttatgggaagggagtgaggaggggacaagccagcctccttccccatcaatgcccacaacctcccatcccctggacccagccaccctaggagttctccaccccaccccatctcgcctggcggaggggaccgccgggtttgattgatccatctccctccttggggttcgggaagaaagctcttttcttccctctgtcgggtttctttcttgcttctcggccttcacgcttcctcaggtcactggctggcctccaagggcacctagagtcagccctgcctgcagaccacccaggatccggtgacatggggtggacccagcgctgtttcggtcagagccaggggcagctacctgaactcaaccagtctgagcttcctgcttggtcaagatgactgcaggcttgggggcctggcagaatgtctgtgtttttagggactgagttgtccgaaggccacactctgctgccagctggcctttcctcagccttaacctccactcatcccctggtgctcagcttctggctttgtttgacaggtgggcaggaggagagaggggaagctgtggaggtcagcagcccctaagctgatggagtgtgttctgggaggggcaggcgctctccgttggcaagggcagaagtagaagttgtttcttgagcattggatgattaggatgggaggtgcgtgaggttctctcagcccaggggggtgcagatgggtaaggacagccttcactgtgcctttgagctgctttccgctccctgggctccagcctagccccagggccggcagaagagctggcagggatgttctagaaatgggggttggttcctctagctaccccaaatgaggatactcctaggacactcttagccacggtgagcccttaggatcccagctcctgttggaaggagcatccagcatcactgcctgccccaaggaaaagcagcaataaaaggggacactgggacctagaacgtggtgagagaggtggcattctctgactcagagagactgctcctgcgccagctagggaagagctggcacagggaggcagggccggtacagcccagcttcgtcaggagccgcgacaggtcactgcggaacttcacgccggcgaaagtgtagagcatggggttgaggcagcagtgggccaggcccaggaactcacacatggtgatggccacggggagagagccattcagcttgcaggtattgtccacggccttcagcctcgccagggtgtccaggaagatgacgatgtggtagggtgaccagcagaggaagaagatgcttgtcaccaggatggccaccctgactgccttctgccgctgagggcgccgctgggcctggcgcaacctgtgcactacccccacgtagcaccagcccatcaccagcatgggcagcaggaatcccgccacatggtagaggaatcgggaggtgaaccaggcatgcgtttctgcttggttctcttgggagaaggtgcaacgtggcagggagttgttgtgatggccttggctgactttggcgaagagaatctctggcaaggcaaggaggaagcccaccagccagatggtcccacaggtgatgtggatggagaggaggcggcggtggcggtaggcatggacggcgtggacaatggccaggtagcggtccacggcgatgcaggccaggagcaggctgctgcagtagaagttgactttgtgcagggcaatcacagttttgcagaggaaggtccccaggacccagcccacagagccctcggccacggcaaagggcaagatgaagaccagcaggaggtcggccacggccaggtggaacaggaaggtctccgtggaactgcgtgtctgccggtgccgctccaggatcaccagcaccaggacgttgccgatcacgcccaggaggaagatgaggctgtaggccacgggcacgaacacggccttgaaggaggccatgaggggcccctctgtggcagggcagagatgattttccaccagggaggtgtcgttatagttgtccaatctgtccagttcccagaactgcaagggcaaggagacgggagggtgaggacctaaggacctgtctttcctctctgagaggaaccctagctctcttggaggttttttcctacatagggcccactgaccaaatgtcaagtttcaaatttcaattttgaacaaatcactttgtcttttccaacttcagtttttcgcctgtcaaagggaccgcattccttagagtggtggtgctgatgaagggaggcgtgcgggtggctgagctttgtaagtgctggagggctggaccccataagtcagcttgtgtttttgggtcctcatgtacggaagcctgcagccttggcggctggagtcacaggacttcaatttggggaatggacctgcttggtacaaggacccatctgttccagttctgagcagaacagtcgggcactgcaacttagcattgtgctggggactaggggcgggcgggtgctgacttggcctgtgggctccctcctcatgggtcttcctgttcctgactgtctctgttatcactgaaatggcagtaatagcctcccatctggttcaatatgcacaacccgctcaaggtatgtaatattattcctatttcacagatgtgtcttgctaaagatcaggtttgtgtgaaccgacgtttatctacttccaaagccagtacctcccactgaacaaccctgcctgggcttccttctaggggcagcagatgcaggctccctgctacttcccatcactggcaacctccctgcagctaggagcactcagaagcagaaagcccagaggcagagagaggcaggagaaagtgagggcgacacggggagactggcaggagagaaggagagagcctgctccaagtgcagggggtgtgcccgtgatgtctccggaagttccctcctccccatcctcctcttcctctccccatcaccccccccccatcaccccagcactcaggttgtttacccagctaaccacaaaggaagacatgtgcctgttttcacacctttcactcacagctgtcccctgcacctgttcctcctcacctcccagctctgttcttcccaccctccctacccaagcccctccccaggcaattcaaaaccaattataaccaacctatgtggattcaaaatggcaatactataaatgatgaacccagggaggcagaggatgggatggggtactctgtccaccaggctccgggtggcttaatggtgcccccatttcaggagagcaaggcacccccacaaggaggggatggtcacactgggtgccacagggctttcttgcctctcaggagccacagttgtgggtcacacactcactcctaatgctgagcagacccattctccaacctgggtctttccttctggctctgggggaatgagggtctgtgagaaggaggtgtgggagatacatcagtgcaagggtagagccatctgccaacccttcccgcagcatccctctgccattgcctcagtctggtcttccttctctttactctaatgctcaggagaccatctctccatgggtcccatccccaccagcttctctactcctgtccacctcctgcacagaggacagggtaagttttctaaaacacaaatcccatcgcatcaatgttctgtttaaagtcctttactggttccccatcacctgtaagcagtggttttcttctgctttttgtctttatcttattttttcaacttcactttttttttttttttttttttgaggtggagttttgctcttgttgcccaggctggagtgcagtggcacgatctcggctcactgcaacctccgcctcctgggttcaagcaattctcctgcctcagcctcccaagtagttgggattccaggcatctgccaccacacctaggtaatttttttgtatttttagtagagacaaggtttcaccatgttggccaggctggtctcaaactcctgacctcaagtgatccccccgcctcggcctcccaaagtggtgggattacaggcatgagctaccatacctggcctcaatttcacatttaatagcaaagtcagctataagaaaaagtcatatttgtgatcatgttcatcaatagaagattgattggagtctgggcatggtggctcaggcctgtaatcccagcactttgggaagacaaggcgggaggatcacttgagccagggaatttgggactgcagtgaactatgattatgctgctacgctccagcctgggtaacagaccaagacccaatctcaaaaaaaaagaaaatgattggagtaagccaaacttagtgccattcacacatcgctaaatttcagaactcctgggcacagtggctcccagcactttgggaggcttaggtgggaggattgcttgaagccaggagttcaagaccagcctgcatgacatagcgagaccccatctctacaaaacatttttttaaaaaataaagtttagaactcattgcagaacatcccatgcagtaggattccatggaatttctcccccaaacacacgcctttgtttttgttttttgatagatagtgtcttgctatgttgcccaggctggagtgcagtggctattaatacgtgtgaccatagcacactacagccttgacctcctgggcccaagtgatcctcctcctgccccagccttctgggtagctaggactgcaggtatgtgacaacagtgcccagctccaaggactttctttagagtacccatgactgtgtgtgtgtcacagggttcccctggagtggggagtggtgttggggctccaggctcccctccttgactttaaactagagctctccacttttgacttgtgcagtgcttcacacataagctttcattgaagaaaatggttctactttcatttgaaaaccatggacctgtgggaagacgtctaacctcccaacacagcctttatgttcttcccaaatgtatattcctctgacctttcaaactttgtcttctattaataaattattgctctagaccaccccccggcctttccccaacaccccaacacattcctgtctccaaacctctgcttggccttttccttctgtctagcaggtctttctttccaaatttgcctaatttccacccttcctccaaagccgaattcaatcccatcttcagacatccttcccggctcccctcttggaattctctcttctccttatgatgcgtgtgcatttattacagcacccagggttgggatgacactttctaaccagatggcaaggtctcagaagcaggccttctgtgtccccctcccaaggccacgtgttttacgtaggacagacgtgtgctgacctgctctgaaagcagtttcccagagaaggccaggagcccttataacctgagacttagacaagtgcctctgcagggactcactccgtaatcttctgcattctgccttctcccaataaccttgatggccttgatcctagatcctatcttgagtgctctccctctattgggagctatttccaataccgtcactgagcacacccacttgactaatactggaattcagcagtcttcacgcagagccaagccgttcagacagggaggagagaagcagggcctggggcggtcagcagggctggactccacctaccttggccgtgcctgggtgagggcttaggtccagccagcctgtctgacccagaaagccctgggtttctgggcttgtcctccacacaagttcttgcccttcaaagattccagactgactgagttattgctcatctaaagtcaatgcagtgggacatctccctagggctcccatctcctgagaaccagatttagagggggcttgggaggggcctgtgtcttcctccttgccaagaggtatttgtctggcagcgttcagagagggtaagatgggaggaagctggtttgaggggtgctgggaattgacagcacatctcagcaggaggtgtcaaacagacgttttgggggttcgggagtggcacatgttaaagccacttcccacacataggagttctagctcccccaatctcccccaaactatggagagaggcaataaagcaaggttggctccggcctcatgggaaattgaggaatcaggaatcctgaataccatggggcatgtgctgctgaaggaagccctccaatcccatgcccagagggagcacagggcagaccatttgcgtgagcggtgtgcccattctttgacatgaaaagcttctgaaacctgaggccctcgtgcacacacacactcttgacagcaacatgcaccttgcatagacacaggtgccaagatgggccacaccagcatgtggcctagacaggcacccagcagacaacagcctggtcatgggccagggtcacatgccccaaagaaggcaagaaacacaatgaccagaatgaggctgagagtggagctagaatctagttagaaaattgctgtgagcactggggaggagcaggggctgtaacagtgtccagtattgaggggcttagcgggaggtggggggtgtaaggagatgcaaagtgcttggcctgtggtagggcccaaaatgttactcttctccttccctccactgtaggatgcaggctcctccctggataattaagtctccaagccccacctgacttctccaaataatgaggctgccccactgcccagcactggccagcatggagctcagctcacatttgctaatggggattctatgtcagcaggtgcattgggcaggggtgcctagcatgcctcagggatctatcctgggtcccctcctcttcagcactctcagcccagctttgggggcactctcaggcaacacagagttctttacaagctggaaccatgggtccaacctaaccagatgaaattgcatggggaaaaatatacaagccaggactcaggtttaaaacattacccgtccagggataagttagggaggaccaggtaacaacagttcgtcagaaagacttgggagtttgtcacctacaagcttaagatgagtcacgggagtgacgtggccagccgaagggccactgttaccttcatctaggtgaacagaggcttgtaagtgggcagctgacaccagcccagtttggttggtctggacaaggatgaccactttgttgaggggcttggaaaaccctgcccatagaggaaattttcaggtactaggggtgtagtgtctgggacagagaagacttgagtccctgagggctgatgtcaaggcttggaaagaagctccatgggcaagagggcagcaatggactcttgctatgagcttccagggggcagtctagaaggactgggcagaagctgagggggtagcgtttcagtcaaaggagggagaactttctaacagacagaactgtccagcaatgagatggtacctttaggaaggagaggaacgtttgagcccaagtgtgtgggaagagattcctgccctgggaagaaggaggctggactctgccttcaa[450 bp omitted]tgtaggtctgtaccccttaccccgtctttcttcaggaggcccacagcccctaaagaccatctgagactctggcttgccatttgtcacatctcccttgccgcacccacagccttcagggacaagtctgtgagactcctctttcatctctacccacgggttttggccatcagaagcaggtactgtgctggatgtggtgttagggggagagtttaagctactccaagcctctgcagcaagtctttaggcttaagggagccccacctggcaccccagcgtctctttgccctttggatacagagtcacacagtccaagatgcaggcagacaggcctcccaggtgtgtgtggcagcctcttgaaaccatctcctgggttggaaatatttttccccaccactcttgaaagaatgctcattcttgtgtcctgattcttaggtccacatatgcggccactgtttctgccgttctgctagaggagtgggatcagctgcagcctgcgtccctggggaaagcaagagttcctgacggagactctgcagtttgtatgcccgaacccatattcactttgaccctgacccatcctcagcttggccttggggctctccctcatctctgacccttccaactacaccccagttgggcctcctctgctggggttcctctgggacttttgacctggttgcggggggcgggtggagaacctccctttcccctagatgaagcccagaaacagcctgagctggttttggttcctcttcttcacacctacatgatgaaatgagatggtccacgtggacgggctgtgtcgcctgtgatgctctggtcacactgaagtcatgatgtgtggtaattgtctatggagaggggtcatagaaagccaggctctggggcttggaccagcttcaccgtgcgctatagcagcttcccctcccggctggtgtgcagggtggggctggaggtatagtttatgaccagcctctgtggatgccccagcccaggccctggttctgttggaaggaggctctcagatcgagggtcgcatagacagggtctgctctaggtctgccaggatcggcctttccagcaggatgggtccctggcatacccaccccaggacctggaatcttcttgttcctggttcttagccatctaatttttgttctatttggacctttcattcatgagaattagcagcccctccccaccctccagcccctgccttaaagaagtggacattttaagcggctcgagttggtcttcgagttcaagaggacaaatggaatacagaatgacgaacctggcttatggccaggagcccccagttcctttttttttttttttctggcaagtttgtgtaaccaaaaggccccagttcttagctcaacatgagagtgtaaaacccagcgttcaaggaatgtgaaccaatacctggtatgggcaaggacaaggaggagaataggaagcagaaggaatagaaggacccagactaactccagaggaaaatggtgagctaagacctttactgcatcacaaatcaataaatacttattgagaagctgctacatgcaagattctcctgcctgtaccactacgcccgaggtttttgtactgtgacactgagggacagtctgccaagctgctcacggcccttcagtgagtgggtgggggcggaggagagggtctgtgttctgaggggacattggccctggagacagggtgtgtaggagattcgtgaagggggaacgaggcactggtggctggctgaagagctccagagcccagatggtcctaggactcctgggctcctggctagaccctgagtgagggatccagatattggaatgcctggctgaggatcactcatttgaggtgtgacatgaagaaagtcactgggtccctttcccccagatgtaggttttcttgggacatgccctgctgcccctgccccctgcccccacctgtccctagtaggtcactcagtgaggtgaggcgtgcagttaggggaaactcttaag

SEQ ID NO: 2232 - DNA, 4299 bp, Homo sapiens
cggtgtctggccgggcctgtcaccgggacgaagctcctgggctcaagtctccttccatggcggtgccttctccaggctgggttgcctcacctaagacggccatgcccagcccgggggtctcccagaacaagcagccgcctctcaacatgaactcttccaccaccctgagcaacatggaacagggtaccctcccgcctagcggcccccggagcagctcctcagcacctcccgccaaccctcccagcggcctcatgaaccccagcctaccattcacttcctccccagaccccacaccttcccagaaccccctgtcactgatgatgacccagatgtccaagtacgccatgcccagctccaccccgctctaccacaatgccatcaagaccatcgccacctcagacgacgagctgctgcccgaccggcccctgctgccccccccaccaccaccgcagggctccgggccagggatcagcaacagccagcccagccagatgcacctgaactcagccgctgcccagagccctatgggcatgaacctgccaggccagcagcccctgtcccatgagcccccgcccgccatgctgccctcccccacccctctgggctccaacattccactgcatcccaacgcacaggggacaggggggccccctcaaaactccatgatgatggccccagggggccccgactccctgaatgccccctgtggcccagtgcccagctcctcccagatgatgcccttcccccctcggctgcagcagccccatggtgccatggcccccactgggggtgggggcggggggcctggcctgcagcagcactacccgtcaggcatggccctgcctcccgaggacctgcccaaccagccgccaggccccatgcctccccagcagcacctgatgggcaaagccatggctgggcgcatgggcgacgcatacccaccgggtgtgctccctggggtggcatcagtgctgaacgaccccgagctgagcgaggtgatccggcccaccccaacggggatccccgagttcgacttgtcgaggatcatcccctctgagaagccaagcagcaccctccagtacttccccaagagcgagaaccagccccccaaggctcagccccctaatctgcatctcatgaacctgcagaacatgatggcggagcagactccctctcggcctcccaacctcccaggccagcagggcgtccagcgggggctcaacatgtccatgtgccaccctggacagatgtccttgctgggcaggacaggcgtgcccccacagcaggggatggtgccccatggcctgcaccagggggtcatgtcccctccacaaggcctcatgacccagcagaatttcatgctgatgaagcagcggggcgtggggggcgaggtctacagccagccgccccacatgctctccccgcagggctccctcatgggccccccgccccagcagaacctcatggtgtcccacccccttcggcagcgcagtgtgtccctggacagccagatgggctacctcccggcaccaggcggcatggccaacctgcccttctagaagtcgctgccagggctggagccggggcaatgttgcaaatacgataaccttaacaaagttcttcccctcaatgttgggatggcctgggtcgtggggtggggtggagggggtgggagggggcttgtgtagggagtggcatttgtggaaaccagatgtgctggcagcttagggggaagtggcagtgtggggtgggggattttgcattggggttggttccatttcggccaccaggactgcccctcccccactcctcccaattcctatggagcctctctattttacctctttccgtgcatccctgcacccgccacacccccttcagctatgcttttggagtcctggatgggaatctggggggagagaggaaggacaggtcaggtctcccccagccccttctgctcctgtctcctcgtgtccgcattgctggagctccacctccctcttggtttctccgcacccgcccattttccttctgtctttacctgcttcgtatcctttccctgctgatgtggctgacccctctcccacccctccctgcaggcggctggccaggtgggcaggtgccagccggagctgtaaatagagcgctgcgcttttgtgctggtttgtgcgtgtgctgtatttctgtgttttgatagaagtcacacaaaaaaaaaaggataaaagaaacccttccccccttcttcaagttattgctccctccattcccctggacccagggacatgcagccctacatggccacccactgtttgcagtgtctctgggtccctaagggataccattcctgtctcgtccccaaatggtaagatgacgtaaatgacccactcctaaactgaggtcagaccacctaggcttccacctggtgagccctagcagggctgagacccccagggcggcagcctgtctgctgctgagtgattcagggagaacatgtgtgcacgtgcatgtgtgtttgcccacaccggtgacacggggccctggctttccactttggatgcccgggcatccgctgctgctacatcttagccagaacttgaagtcttttgtcccagtttgggatgaaggaaaggaggaagaggcggtggctgtgtggcccccttgagtggagccatggaaggggtggcatggtgccactggggcctgtggctgtagtagccctgggccaggtaacctccagggccctgacttttccagaggctgctgccacctacttcttatcaaagaagggggagaacagttcatctgagtcagtgcacctcccctccagtctccactccctgaggatggaatcggggaaacagcatcctgccgcctcctctctgcctgcccactcaccggcaaggttgtccctctgcccagggctcagggccatgtaccagatctgtctgtgcccacccaggcacagccactgcctcccccttggctccctgctcctacccaggagagctccctatccgcctttggtcagagctgaagccatatacgactgggtgtttgtccccctactttggccccaggagtaaaaaaacttctccttttctcacttcctttcctgcctcgggaggtggcagggcagttccctggctgaggccttttgcgccccacctccaggaccaagggccattctagacagggtgtcttctaccaggacccgtccctagccttcctggcctggagggcctggtcttgcactggcagctgtaatacaaagggaactcgccccacttctcccagcctggtgctgtcctctcggcccaccatcggccaggtccagcgcttcctctggggctgacaacaggcccctgactcaccccggtcacctcccagggtccatggccagggcctctgtgtttggggggccacttgcccttcatcctgccaggcgctttgcccgccctgcctcagcctgggccctgtgcccttgagccctccacccctggcccaagacccccccaaactgtctgactctgtgtttcctgccctgaggagagaggggtcagattgcagcgggccgagtgccctctccgtcccctctcctcccacccacgccacaggccagcctactcttccctccatccatggccacacccccagccattttgtaccattatataaatatatatataaatataaatatataaatacaatatgtgaagacatcttcttggtttttattttgaaacaatttttaggcttgttccgggggtctctgtgctgcctgtactgtattgacctgttttataggtgcctttttattaaaaagaaaattcaaaatccagcctcttgcctctttgcatctgcttcagactcccccatcgattacccagcttgcgaggagatactcagagaaaaaagggacgtcttagggcttcctcgttgtcctgccgtgaagacactctcacgtgagccacagctgttatttccccagtggggcctcccaaggagcttggctgcttggcttgagtgggacaagggcaggggtccctgactccccacctgatcaaaggctggggaggtggtagggagcacccagaactgccggacgggcctcccacaccccaggtgagcaaacaagcacggagcagcttcctgcggttccatctgagtgacatcctcacgggggcagggcacggcttcctggggcctggggacttccctgcctcagtgtgtttcttacacttccctgcctaaggtgatgccacggaggggatggttgagatgactcccacgggccccttc

SEQ ID NO: 2233 - protein, 496 aa, Homo sapiens
MAVPSPGWVDKTAMPSPGVSQNKQPPLNMNSSTTLSNMEQGTLPPSGPRSSSSAPPANPPSGLMNPSLPFTSSPDPTPSQNPLSLMMTQMSKYAMPSSTPLYHNAIKTIATSDDELLPDRPLLPPPPPPQGSGPGISNSQPSQMHLNSAAAQSPMGMNLPGQQPLSHEPPPAMLPSPTPLGSNIPLHPNAQGTGGPPQNSMMMAPGGPDSLNAPCGPVPSSSQMMPFPPRLQQPHGAMAPTGGGGGGPGLQQHYPSGMALPPEDLPNQPPGPMPPQQHLMGKAMAGRMGDAYPPGVLPGVASVLNDPELSEVIRPTPTGIPEFDLSRIIPSEKPSSTLQYFPKSENQPPKAQPPNLHLMNLQNMMAEQTPSRPPNLPGQQGVQRQMSMCHPGQMSLLGRTGVPPQQGMVPHGLHQGVMSPPQGLMTQQNFMLMKQRGVGGEVYSQPPHMLSPQGSLMGPPPQQNLMVSHPLRQRSVSLDSQMGYLPAPGGMANLPF

SEQ ID NO: 2234 - DNA, 200925 bp, Mus musculus
  misc_feature (1)...(200925): n = A, C, G or T/U
atcggccttatgctattgatggttgccctttcctgggtaagcttttccgtagttacttttcagaagttggaagattagctggtagggtcttgtccaaagtcaccaatccctttattccatttactatcagattttccttcttcttcttgttcttcttgctgttcttctttctgcttttgcttgtttgtttgttttgttttgttttgtttttgacagtttctttgtgtagtcttggctgtcctggaactcaccctgtagaccaggctgaccttgaacccagagatctgtctgcctctgcctcttcctctgcctctacctttgcctctggagtgaggggaatcaaaggtgagcaccacactttttatctcctgaagcacgtggcttagctccaacatcacctttgctggtgctcctttctcctccgattgtacgttttgtgtctctctttgtccagtttgctcttttcattatggacctgcataagagaggttactaatcaccacacggtacagtcagtactgagcagtcttgaaatctctgcccaagccggaaatccaaacgtcttcaacttaccctcaggcagatatttttaggacaaacgcaaaaaaaaagctgcattattattattactgttattattattattatgccaaaataacacaagatgacttctagaccacttcctaatattcttcatctctgaaacctcttgacctgtgctgttataatttgcatggctctcagcactactatctcccatgctcccatcagaatggcctattaaacctgattatagcattcaactgcttttctaatccaaagcctcaaagccttccatattcttccaaatgaacgcatggtcaggcctatcacagcaatgccctgctccctgatagcaactcctatcttagccaatgtcctattgctgtgaagagacaccatgaccaagacaactcttgtaaaagaaagcatttaattgggggtttgcttacagtttcataagtttagtcaggtaccatcatggccaggagctcagagctatattgtgatctacagaccaagagagagacactttgacttaggcatgggcatatgacatctcaaagcccaaccttagtgatatatttcctccaacaaggccacacttactcctcctaaatgctttcaaatagtgccattcctaggaactaatcattcaaacatatgaggctatgggggccattcttattcaaaccaccacggccgttgtcccagcaagtttttgctgctcagctcagcattctgctaataaatatatgacaaaaagaagaaattccggctgacaaattatttctgaatattgaggggcccaaagaacacccgtttctagctttcccataatgttcagcttaagatcttataaatatggacagagagcactagatacccttaaaaatttttttagagttagatttttttttgagtagcatctctctatagccccgattatcccaaaacacactatgtagctcaagccagatttgaattcacagagacctgcctgcctttgccaccctagtgcttgagattagcctaatgatatcttccctaccccaagatttcatttttattatttttgaatcatgtgtgtctttgtgtatgtgcacacgcatgaagttaccctcagtctagaagagggggtcggatccttggagctggggttctaggaggctgcgaaccatttatcacaggtgctggtactcaaacttcagccatctgcaagaacagcatctattcttggctgctaaaccaactctctctagcctctgaaaaggtttgcttgtttctaaagataatctcttgtagtccaggctggccttgaacacttaatcgtccaaactctggtttcccagtactgggaattacaggtgtgttccctcatgctccacacttctccattcacccggcacacagctctcatggcatgctgacaggctgagcctctctgctacgctaagagaacacttgcatgctagcttccctgtgaagagaagccgactgggcacagtgggcagatgggagccagtagcttcttgcagaccccctggtcctatgagcataaagctaaaggttaataataatcacaacaggcaggcagcctatcactgcctccctgtctggctgagaggtttacaacttaaactcacggcaaaggaagaaattggctcaatcacttggagtaacggtacatgaagagccagttgggcatgaccactacttaactcagggagccggggctgctgcatttaccatccgtacacactaataaacacggagtgctacaaggtgaaaattaacaccacccgccacccacctggccttgctttccattcgccagcttgccttgctctgaggaccagactaccgccaactaccgctaaacacagaggaccagactgggagaacagggctacaatgtactgtgcttaagaccactctttcggaggagatggcagtgatggtcagggtctcatgtaaacccaggaacttagaacttggcctagaacttgctatgagcagtggatggccttcaacttctgatcctcctgcctctacctcccaaatacttaacctatagacaggtcctgtttgtacagtgcaggggatgagacccaggcttcatgcatgccaggcaagcacttccagctgagctacatctccagctgcctacttcattcatttaaaaagtattaatttaaaattgtgtatgtatgcatgtatgtatgtatgcatgtatgcatgtatgtatgtatgcatgcatgtatgtatgtacacctaagttcatgcatgtgcaccatatacatgagtcctcagaggccagaagaagctccagatgccctggagccggagttacagatggttctgagccaccacgtggttgctgggaattgaacatgagtcctctgggtgagcagttagtgctcttaaccactgagccatctccccagccgcaacttcattctttaaatgagacataaactagacaatgtggcacacaccaataatctcagtacttggcaggcagaagcaggagaatcactgcaagttcagggctaaccttgactccatggtgagtaccaggtcagccagggcgacatagcaaggcctgcttcaaaacaacaaccaaccaaccaaccgtaaaacaaaaacaggagagaaagaaccatttaaaatttaccagctccaagaacttatcttaaactctcctaccagaatgtctgataggggtaagcagagagaagcctggcatcattgctaataataaatatctagtgtccatttcttttagtgctggactggaactcagaccctggcctgtgtaggtgagtgtttccccattgagccctggttttgtttttggaatgaggtctcgctaagtggtccagagtggttttaaacatctccaccccagacatcctcctatcccagcaaggggctatagacaggcagtacctggatggctttcagatctttgagcatcctcccagtgacttttgtggagtggtccccatgatgttccacagtttccaggtgaggattttgcaacgaaggcctcactcagatcctgtgtggtgcacacggtactgagtccctcggattagaacggaacctaagcatctagcttcctctcatcctcatggctctgcttctgaaatatctgtgctgtgggggtcaggtcacagatcagaaaagacaacggaagagagcgctaagcagaagagcttttatgggccagttctgcatatactcatgaattcacttcctctatcccccaacttgccagctaaactctggagccgggagagggtacactgagcaggactgagacctggccttctggaagcttccaatgaaggagctggtcagaacacacactgggcagtccagatacaaggcagatgctggggagaatgatgacaaatgtccagacagtgcaaagggactcatggaggagggagaggcagagaaccaagagtgtggcttggagcccacagcaacctctgctctggggcatttcccagactcctaaccactcggcacagagggcagtacagtgaactgttctccaagcaaaagctctgagcaaattatcagaagatggcctagtcggccatcagtggaaagagaggcccattggtcgtgcaaactttatatgcctcagtacaggggaacgccagggccaagaagtgggagtgggtggaggagcgtgtgggggacttttgggatagcattggaaatgtaaatgaaataaatacctaattaaaaaaataaggtcttctagatcacccacttacttcacactaaattaggagtatgtatgtgccatggatgccaaggcaaattacataagcataagagatatctgggagacgcacaacaaattaaaaactctgtcattttactctgataataaattagcatcatcactacattgaaaactcattacgttattactataagaatatctagctttccatcacattcccaagagactttgaactttaaaaaaaaaaaagctctgagcattcttttatgtcatctcaaaaaccgatataaattttaatttctaatttatagtatagtagcatttgttttgttataattttaagataattggcttaaattaccagtcaccgaacaacataacttcattcttacggtttgtgaaaccctgacatgtacaggcagtcgtgagctgcgcacatgagtctctgcaggagtagcaaacatgtcttccctctctctctttttttaaaaatagatttattcatttttattttatgtgtgtgaatgttttacctgcgtgtatgtctgtacaccatgtatatgtctgatgctcatagcggtcaaagaataaggtaacagagcccttggaactggagttataggcagttgcaagctgtcatgtgtatgctggcaaccaaacccaggtcttctggaggatcagccagtgctactcgtactgaggcatctctccagtcccccaggggatgggaaccaatatctgcatgggtaagctggagagttaaatggctgcccactgagagtggaacacctaaaaatgtgacacgcttcttttcttccctggttcccagcaaagtaacagagagttttgtttgttttaaaggccccgtttccccagtgaaaacttgagggttaattttcagcatggtgcctggggactgagtggtgggactctcattacctataatgggagtcataccgattccctctgtgcatgctatatggaaaatgcacccctcggtagctacaaaattttggttttgaaattgagcctgtctttctcaacacaaagcagatttctagagacacccaaagctatccggtgttggcctgaggcccgtgtgagtttgtgtgtaaggaagaaaatgcttgtgtgtgtgtgtgtgtgtgtgtgtgtgtgtgtgtgtgtgtgtgtgtgtgtgtgtgtgcacactccctctctgagcagcaacatgggaacattacaccttatagctggcggcagtagttgctgtatctcaccccaaagctttgttgggaaccctataaacccagcacaccgtgtgtgacacccagtgaaatgctgcactttcccataataacctgagccccgctgcctgtcattaagggacctctcttattaaacatctttttttttttttaaatggctgccatcatctggtcccagtgtacattaaatcccattataattataaacacactttaccataacatcccttgcagatctcatccacactgcctaccccctcagggcatctttgcactaataacaactcagatttgctatttgagttgaaaacattaggcccccaacaccatttgcaatatgctggggagagaaagggaagaaaactctttcttgtcctcagtcacaaagatcttggggggtcacagtgaccccaaagctgctggcacaaaaaaaaagaaaatcccttcttcgttcctctttgaaaagttctctagccaggtgcatcggtccacggaggatatacagtgagaccctgtcttagccacccagtggtgcctacagatgccagggaaggcatcctcagtagctagaagagatgccaaagtctgcagtctccactgttcagtgcctggtgatggaagaagggtgatggaaatgatcggattggctttcctgagcctaaagtaccagaacatacaggtcccctcaatacttggccctttgctttttggaaggtgtgtctcgtgatgttgttccacttagttcacttacggaactcagaatacgcatgcacaccacaattagtggtggtggtggtggtggtggggggggcatcaaacccagaacttggtgtttgctagtcaagaactctgaagtaaactgtatcctcagcccaaagaattgagacttgccattcacatgcaagtaaaacactcaagctcttgagtgtctcttagatgttttactgtcattcaaaactctttttcaatagtctgaggtcctgggaaggaaggaaagcccaggcagcaatatgcaatagttagagtcactttggctggtgcactgctctatagccctgtcctcaacagagaaaggcaaggaaactaaaagaccttggttgtttctttcatttttttcagtctaggtgatctaggcatgaagaacagagctgtgctattacacgttgtgattcagagcatcatgttggatgcaaacagtctctgagcctcagcttgcttgcttgcttgcttgcttgcttgcttgcttccttccttccttccttcctttctttctttctatttatttattatatgtacgtactctgtagctgtcttcagacacaccagaagagggcatcagatttcgttatggatggttgtgagccaccatgtggttgctgggatttgaactcaggaccttcggaagaacagtcagggctcttaagcgctgagccatctctccagcccgagcctcaggtttctttcctccccaaatggtcatggaacaccaacagggtggttagaaggactaactaaaacaagagaggtaacgtgttaagcttttcaaggaatgctctgaatgaattattacccccaccacctccttcttacatgtttctctcagactggatatacttttccactagccgagcttggagaggctccatggctgggaggtacgcaggaaaacaggaggtgaaggaatggggagatttgtggtggaggtctgcccaatggttagctcacctctgtctctgcttctagcatgactaagactgaggcctcttgcattttgtcagaaaaccttaaaccaaggtcctatgttttgtttttgagagaaggtctctctcacttggatacctggggctggcctgtaactcacagtgtgactggtctttgtctccatagtgttgggataaaaggaaagcagtgtcgtggccagtggactttcgcctttttaggagttgatttttccagtttccctactacatcttttagaaacaaaacaaaacaaaacaaaacagtccaaaaaacccaaaggtgggggagggggcagggagattgtcttttgatttttcaactctgcttggatttaggccttaccatatgaaatctctcaactggggactctcattgcttcccaggatccaaggacacagctctggctataaatggtgctggtttgggagtgggggctgctgctgctttatctgggcccaataaaccttatcaaactgctgttcggccagccttcatcgctaagtggaaatgctctggagcccaatgctggcacccagcccacagcctcgcctgccttctccctttctgttaccttccccacctcttaaatctaggcattactctctctttaacacttcctaacaagggctgggctctttaatgggcagagtttatgaagcaagggagattttcacatagagtgagtatggctggggttgggggggaggccagggccaggcaaggaattgttctttcgtttccattgtgtctacggattctctttctctgatttgaggattaatggtagaataggatcagaggttaatcgtgtgcctctccggtgactgctggagagagggtggtaggtggatgtggaccctagatagcaagccttctttagacaggaactcaacaagctcaatgctccattcccatggccaggcattcacggcaggggggtgtgtgtttttcctgttcccttctgctcatccactcttgctttctttatagatggcagttccttcttaacgtcctcaaatccccttcttcttacagagggttcgccttaacttgaaagaatcaggtagcctttacacaaggttgttttttgttgtataccaactgactgggggggaggggggtttccgccttgtctcacccacatgacattgcctatgagagggtaactcaattgtagttttcttcctttgcttcccagtgctccgttctgcggacttctctctcccactgctaatctgagacctgggagtgtcaattgttaggatgccttgttattataaatgaccaccacgttagcagacccccgtgcagatcttgtgtaagctctgccacctggtcttcgtgggtttttttgtctccattcaccgcccactttccttctcctttagctcctggggaatcaagatacgattctgtgggtcctgtgggagatccgcggtaagccaagaacacagcacccctaaactgaagcctggaactaataccttaggactggagggtggggctgtgtgggtgacttttctgagacccctgggtggcgctctccaccacacccccaataacactgcgctggggctttggccggaggccagtgctcagaaaagaaccctccaacctcaattccctgcctagcttcgtgtgcaaaggaggagacggtgctttccgcgggtagaaggaatattttttttcctttggtctttctaccctacggtttgtcatctcaagtacgccctttaaaatggtccagccgctgagggaagaaagtactctggagcggcccagcgctcttccaagcttccagtagctcctgaaggcagagctgagttaggcgcagaatcttcagaactttccatccaggttcctggggccggggaagatgggggggggcgtgcgggcggggaggatgcccgagattaggagtgagaaagtattactactcaggccttcgcatctcagtgtgcaacaatctagatagcaaaatcgaggtgctgcctcctaccagatttctactggcccctttagatttatctggccaaatccggcgaactcctgtggtcaggcatcagaggcctggtttgggacttgggaaacgacccatttaaagctagggtaagggaggatgcgatccgaatcctgagaaaaagtgaaaagctagaagccacacactgaactggtgcaaataataaaaaacgggacaaaactgcgctcttgagtactggagttgggggagttaggggcgcgggatacaccgcatgcccagtggaaatgaaaaaacctggggctaaagtgggaaccgcttctcccactcatccttctgaccccttggggactgccaggtcctctgcggctcctcttccttgcaaccttttgccctctccacctagccaacgagcagcagccgctgccgccggggcagcagctagatgtcaggagaagcccggagcgccgagcgctgggaagggaggggagcgcccgggaagggagggcagggctgggagagcgcacgggctctgccagggcgggggtggggcggggtgggcgggccaggaccggccagggggaggggagggggcagctgtgggcagggagccgggctcggccgccagcactaaagatggagaggcgccggggcctcgcaggggagggggctcggcgttgacgtgggacgcggcggaggcgccgcagccggtggtgatttgctaacctatgcggcagagaggagttaagggtgacgagagcgggtactgcgaactgccgggcgatgccgccgctgccgccgtgagatccggagcaacagttccccagcaacaccccttccccgatccaggcacacccctaaccccccaggcacgcacacccaccccaagctccaggctccgtaagcggtaagtgtatgtgtgtaggaaacccgggaaggactcgcaccgcccagcgaccgcctcccgccagggcgccctggggcgggagaggtttaggcgggtggtgctagctttggccactcggccgctgggctcgtgcggggttctctggttgctgctgcagcagcgatcgccagtgcccgttgggggtcagctagaaagcggcgctgaggctgtcagcttgggcacagctgcctcaccaacctttcttctccgggcacggtccggtccgggtgagaggtggcaggccgggaggtctgccagggctgcgggcgcgtgtagtcggggactgggtgtctttgtacaggcaagggctggcggaggagcagagagcctgtgggtgctcatatgtatgcggaccggtgcgcttggcgtgagataggattgtgtcttatttatttgtgtttattcgctggcgagctggggagctagacccggaggaagcaaggagtgaacctgggggtcgggtgggaggggactggtatccgatcgggttttgttttctttagagaaaacgtggtgggattttttcttctttttttgattggacttgatgccctcttttaaggagagagggacgcttcggagagactctggcgctccgagtcctcctcggctctcggtgggaacggccggtggagcgggagctcgctgtgcgctcccggccgcgcacggtgggttcccggctctgcacctgatgcattcggatgtctttcccaccctggcgcgctgcaagcttgcccagcccctcgcacgctcccgcacgcgctcgaaatgcgcacgatcctgccagcctgcggaccccaccggaatgcacaggagcgcaccgctgcaaccagctcgcctcctccccgccacgctcccagcgtgtttgactcgggcacgccggcagctggtgcgggaggccggggaccctgctggtgacttccgggggatcgtgatcttgggtggaaggtggaggacccagagatctcttctcatttggcctcccaccactcgcctccaggcttttgtgcatccttttctcccctgggggggttgcgctgctcggccggcctagcagcggcgtccagcccgctcggaccttctcctttccccaggctctttcgctttccccctttcttagttctgttccctttcttccaggcacctgactcctggggaaaagttgctttcccaagtttgccaaagtcctatgcaagtctcggcgggggtctctgggaacaaggggtgtgttgcaccatcgatcctcggagctctggcgggttagcgctggctttgcccagaatcggctgatcgctgcacctagggacggtcggatcgcgggtgcggagccgccggttagggatagggcaccttgatttccctcaaggcccaaaaggttcctttgagcagcgaaccttctttattttggcttctcccccttagttctccaaatctctgatctctctcccgaaagcacaccgtgctcatgaagcttttgaggaatggatatctcaccgttcttgatgatgccctccgtttccactttagggtgggcaataagagtggccagccactattgttaactctttccgcatgagttttgcacctaagagtctttaagactcctgttgagggggaaggcaagctctctccaccctcttccccaggctgtgggaaatgttggctacagagagacagaggttgggaccttatcccgttaggtctttctgcctatgtcccaatggctgttcaaagttgggagcctctcagtcatccagaacactttctgggagaggtctttgtgttccagccctgtcttcccttcttttgggcttaactcacgccagagatgctggtgccaatgtcacttatagaaccatattcagtgtcagtttttctctttgtcgctgggcttgccaacacctgggaggcatccagtctggtgtgcactctcaaggctgttgggaacatactctcctatggtgttacccactttctcattttagagcattctgtccattgggggggcttgtgggctgtgggtaaaagaggaggctgtagcatcttgtataattgcatgtaggtgtacattcacgcgtgtgcacgcctgtgcacacgtgcgcgtgcgcgcgcacacacacacacacacacacacacacacacacacacaccttggacacatacagcagctttaaagaacttgtagttaaaaatgacttaaggtagaatgtgatgtgatgggtgtgagggggagggtgcggtgtggtgtgtttgtcacagcctaagtatgggtctgccaatcctgtgcagccctgacttaagcgtgcaaggacagaggccatagaaaccactggatgatggagaggagtcatgtctaggatgactaggagaagacagcttcatggccagcagatctgggaccaccatcatgtttaacagccctggctagatctggttgtctcctaaggccgtttcagtgagccagaactagaaaaacattgaagatgagggcttgcccatagggggtggacaggaaagccgaatgcttcttacttttaagtaagtttgtgagcctcatggtggacactagccttatccaggaaggctctgctctcaggctcgaagaatgcctaggattcattgcaatcatcatttcgctttattcgatggatgcatgcttcagagcagtgggggaaagagtgtggggaagcgcaaaccttccttttcctctcagcgtgttggaaaggatgatggtaccttcctaggaagcccacccaccttctgctacccctcccccgcaaccaagcctctttctggggtagaggcatactgtagcctttgactttttattataagggacactggggaagttgttgtcacttgctcaccccttttgtcttctcttcccttcttctccagtcccctctgctggccccgacgtctaccctgccccaccttgcagagcagagaaggaaagagagccccatgcctgagcccaggggagcatcatggatctgacaaagatggggatgatccagctgcagaaccctagccaccccacggggctgctgtgcaaggccaatcagatgcgactggctgggactttgtgcgatgtggtcatcatggtggacagccaggagttccatgcccaccggacggtgctagcctgcaccagcaagatgtttgagatcctcttccaccgaaacagccagcactatactctggacttcctctcgccaaaaaccttccagcagatcctggagtacgcctacacggccacactgcaagccaaggcggaggacctggatgacctgctgtatgcagctgagattttagagatcgaatacctggaggagcagtgcctgaagatcctggagaccatccaggcatctgatgacaatgacacagaggccaccatggctgacggtgggggcgaagaagaagaggaccgtaaggctcgatacctcaagaacatctttatctcgaagcattccagcgaggagagtggctacgccagtgtggctggacagagcctccctgggcccatggtggaccagagcccctcagtctccacctctttcggtctctcagccatgagtcctaccaaggcagctgtggacagcttgatgagtataggacagtcactcctgcaaggaactcttcagccacctgcagggcctgaggagcccacactggcagggggtgggcgacaccctggggtggctgaggtgaagatggaaatgatgcaggtagatgaagcccctggccaggacagccctggggcagctgagtctagcatctcaggagggatgggggacaagcttgaagagaggagcaaagaggggcctgggaccccgactcgaggcagcgtcatcactagtgccagagagctgcattatgggagagaggagagtggtgagcagctctcgcctcctgttgaagctggccagggaccccctgggcggcaggagcccctggcacccccagtggagaagcatttgggtatctactcggtgctgcccaaccacaaggccgatgctgtgttgagcatgccgtcttcagtgacgtctggtctccatgtgcaacctgccctggcagtctccatggacttcagcacctacgggggtctgctgcctcagggcttcatccagagggagctgttcagcaagctgggggagctggctgtgggcatgaaggctgagagccgccctctgggggagcagtgcagtgtgtgtggggtcgagcttccggacaacgaggcagtggagcagcacaggtaagcccctgccgcagtagccctgcaaccatgctctggcttgcgaagcgtttctttatgccaggaccatcctgaatctggggacttgactcctttgtgctctttgaaaaaccacaccgaaccattcttctcattattgaggcataggcgggcacggttattttcagaggacagtgaggagaaatggtgtctatctggtaacatcagggaactcttggggtcagcctgtaggccctccttgccattttgcttttgggcttccatctggttttcctgtggtttggactacacttttgttttgcctagagtgactgtttaataataaagtgatgagaagaagggcagaaagtggggttcaggctgagggtctcctctgatctggatctagccatggtatcagtctagctttttctttccccaaggtcggcagcctatgatgaaagcaggggttggggatcgtttaagtcctgtatgtacccataggtctcaagtgtctcttctggcagacacattgtgaggcagagaaagctttagttaaatttaaggagaagagttttggtcttacagcctatatagcctcttctcatgccatctcttatcataaaggctagccctctggcttctggcttcatctttgcaacgcccttcccacttttgagttcttgtgatatgtttggtttaggacaggtgcttcacctggaattgcacctctgttacaatatcccccagaggtaggttgtgtttcttttagtaagacacagggaaaatgctgcggctgagttctacgaaggcaggaagatgcaaagtaagacatcctgtgcgtgatggttccttgtagctacccaatgaagaagatccttcctgcacaacaggttggggagcactggcccaagagaagggagttagcagtgggcttgccttttctgtttgccataaactacaagcccatcattttcgccccgcgtccctgagtcggaccagttgcgcccacaaatctggttttctgttgttatggatgctaactttttacacaacttccggctggctgatttgctgaccttgggtggattttccacctttgtgtgcactcttcctcctcctccattcctgttgcttatttaggtgggggaacttgagggggtgggaaaccgatataatcacctctacccgcagcgtgctccggaagcttcctgaccggccgagctgagctgtaccttatggaaagtggtactcagctaaaaaagtaaacatttctttttccagagagtacagaaaataacaactgcggatatgtgtcttcttaggacttgagctgctcaaaaaatagactgatgaaattgtgcttgttttttgctctcacttttcttaagaggaaacacccccctgaaccttgaccagataggtctatcattccggatgtgaatgtgctgtgaaaaggggggtaatatggaaagtcactttttaaggtcagtttttgggtgtgtgtggggggggtagagagagctctgtcggtaaagtgcttgctatgcaaatgtgaggacctgcatatgtaaaaagccatgcattccaacaacaccaaaaaaaaaaaaaaaaaaaccccaaattcagcaaaatgcagctgcagtcatagcccaggggaggtggagatagactggaatcctggaactgtggccagtcagccaaattcacaagctccaggcacaacaagagatctcatcatatatatacacatacacacacacacacacacacacacacacacacatatgtatatgtgtatgtatgtatatatatatatgtacatacacacatatatgtgtatatatatgtgtgtacgtgtacatatatacacattcatacacatacatatatctgtatatatatgtgtgtatgtatatacacatgtgtgtgtatacgtatatacatacatgtatatatacatgtacatatatatatatatggatgtgaagaatgattgaagaagatttctggctcccacaagcacacacacacacacactcacaaataaagtgtttttttatctgattttttaaaagaaaatttaacttatctgcttgggacaaggtcttactccatagccctagctagcctggaactggctatgtagactaggctagtcttgacctcacagaggcccacctgcttcctgctcttaagtgctggggttaaggttgtgtaccacatgactggcctttttctgggtcataaatctcccaagtcttccttacagaatcaagaattttcaatgagtccatgtacgtagttttctttgtattcaagaaggccacaaaagatgtaactgtcccgagagttctgggttctcctgtgatgggtccctaatggaaagaaatgagggttggctgagctgtgtctgagcggacacgtgcaggggtgagcatctgtaggtgttcctagagctctctgagctcagtttaagggttgatgttgaccgaaatgacacccaaagtcactggggctgtggccaccatctagttaccatgaaagtgaagaactgcctctgtgtccttcattttattccagccttattcctgtatctcaccgttggctctgggccctcgtgtgtgaggttccgagcattcctgtgtgttggagcccatgtgaggtgatgtagactatgtccctgtcctcattagcttgtaacagtgaagcttgattctggagttcttgttgccacaccatgtgcttttgactgagggtggaagtgagtccttcaccctgagcagctagatctggtgccagacccctccgtgataagctctgaggtccgaggacatcaggagagggagaagatatttctccgagtatgcagccctggctacccctggatagatgtacttcgtgggaggcctttgccgtcttccctccaggcgcttggattaatgtaccacctccccatttcccactgttctgtgcctcacccccctcgcacctagcatcaatctgagacatgttcagtggaagaatagtcatcacagccacgagagcaaacagaaaggcaagattgaaaaatcagatgccagaaagccatggacttggccaggatcctgacagggaggtctatgatagggtacaggctgcaaagttcactttatttaaagccatcaggttagtgtgttggtgcagatgaagcatctggcatttattcttgctaggggaagaagaaagggcagggtacagagaagcaaggcaggaaggggctcgttggttattgaattacatccataggtttctccataacttgatcccaacctggggtactctgaggggaacacctcttgactggacagaggcgtaatgaaaccttgcgggggggggggggagttctgtgtcatgatccctggatcaaatggcaggatatcaaagaaataaggaaggatggatggatggatggatgggagggagggaatatcagacacaagcaccacttggataaatctaatggacttactaagtgacagaacctgaaggaagccagtgagaagacacagttgagcagcaatcctctccaatttttggacctctgggtctttcccagtaagccataataaaaggacagtgtatagagaggggaccctgtcaggcttctggaagacgggactcttctgtcttttttttctctgaaaaactggatcagttattggtttgggtgtggtctaggatccagctcacctgatcctgagatgctcctgaccctacccaaccttacccagttgtcagtaacattacacgagcagcagtgttgagccgtgtggagacccagtcctcgtttatggttgtgtctgcctaactcccaggacagctttgattgcattctggtcctttggtgctatagaattagagcgagcctggatcttctataggattctctgttatatcaaatactgaccaaccctcaggacagctcagtggctctgccactcttacttagttctggaagggaggttcagacaccaaggggtggtcttgactggcttcctgaacccacttgtggtagagccctacccaaaaactttctggggcctgctttagaacatatgagccatgttataacccatcctggctgggatgttggggctctgtttgctcagcttggccttgctcacatggcagacgctattttcagtgagggtcctatggccattaacagtttgatttgagagaagatctagtgtaccccagttagctttgaattcacgatatatctgaggatgacatttttttgaacttcagatccttctgtttccgcctcctgcgtgctgggaatctcaggtgtacatcaccatggccagttttaagtggtgctgagggtcagatccaggactttgtgtatgctagtaaagtgctcttgcannnnnnnnnnnnnnnnnnnnnnnnnnnnnnnnnnnnnnnnnnnnnnnnnnnnnnnnnnnnnnnnnnnnnnnnaattggtccccacactgtggcctttgaactcctggtggtcctcctgcctcagcatcccaggtacgagatctgagctcccatgcctgacttccaggcacctctgaggtagcaccaagttccggtttggaacagggtaagctgtggagagccacagcagccacattaataatatgtgatgctctattgacagactttctcctcacccttctgaaggagggggtggggctggcaatccaggctctgtgattacaaagtcggagaggctctgaaagctaaaaggttttgtgtaagtttgtagcaaactcgtttagtggcaaaagctgatgcggggctatatttagcctgctttattttgcatattcatatgtttggctgcaaaaatattaatgtgtttgattacagagtgctgccctagatgccactggagctggtaaacacaggtcccgataaggctaacatttgcatagttctgatttctgaagtgcctggggggggggcgggggtaagggatcgtgggctaatatcaagccccgccccaacttagagataaggaaaatggtgaatggaggaagtgacttgctggtagccacacagctataaatggtcaaggccaggctctctacttgccatcttgttcatgagccttgggcacactgcagcagtccttataagcacatgcacggtgctgttctggctcagctccacctgacctagtctttaggtaccagcaccatccctaaactgccagggttggaggcttcagccatcttccttgacgtcagttctaaaggtcaggtgtctccaggctttgcttagtagctatttacagctgctatgtcattcacagattcaccccagtcctgttcaagcccgtttctgtttccaggaagtatccttttggggtgatgcatgattctgtaactaacttcctgggctcctggaaacctggtcttttggagaggtctggggctatgtaagggagtaagatggtttgccagggtgtgtcccgctgtgttggaggccaaagctctgagttacatgtgttgtgaccccctttccatcctgagctttctttttaagagtactttgctggtgaatcgtattttattccatggttttagattcctcattgtgggatcagacagccaaggtagggttagtttgatttctgtctgtctgcattgacttgtggtttttgaatttatctatcattcattcattcattcatttatttttagacaggcagggtctcactgtatacccttggctgtcctaaaactcattttgtagaccaggctggccttaaactcacagagatattcctgcctctgccccctaaattatgggattaaaggcatgtgccaccatgctcagcttgttgatttgtgggtttttttttccactttttaaacctgctcagggttacttagctagatgagatctggaatgaactcttgacttttgtagacctgcatgttgtaggaaaatcctaacagctctttaaagccatcttatcctaaatggctaagctcagactctacttttgatttcttgctaatttggaaggaaagcatttccaattactatgtgtgtgtgcccgtgtttgtgcttgggagtgtgcctgtgtgtgtgcttgtgtgtgtgtgcacgagatgactttaaaacatacaactgagagttaaagtgtaagacttaagagtcttgaaagtgtaagacttaagagtcttgctaaatgaagatgagaggtgaagagagggctctggaatgttccacgataaataaaagttccgtttggcatcttaggtgaggcgggtggcgcttctctagttattttggtagagtgtctacctccaacacggtgccttatacatagtgaatgtgcttgtactgactctgtgtcacaaggctgattttatcatgtattggctgtgtgactggggttgtggtagttaacctctccaggcttgtctgttcatttataaaatgtggataacaggacctactcagggggtcattataaggagcaacgtgtaaatatttgccgtgcatggaaatgcacaatgcatgtgctccataggtgtctgccatttggaagccattgctattgtatagaagaacaagcttgcagtacaggttcatggcttgctgtgccattccaacccttgcttcccggagggtctgtctgttgtccatgccttcagcactgtaaaactgctatggtgtgtgtgtgtgtgtgtgtgtgtgtgtgtgtgtgtgtgtgtgttgggtggtgactgaccgagtgcacctctgtctttcctgggaagtagactgatgcactctggtgtccgggtacactttgtctcattgaccccgggccttgtgggccatgccagttctttagatgtagctgggcagtgctgcccaaatgtcaggcccaaatgcagagcacagacgtcctacactctgcgtgcatagggctcagtgtgtggggctctctggtggaggggtagtcagcacacagactgccttactacgggcagtcttgggctgggctcacacgaaggaacactaggtgctgagagctctctccctaggcatccttcccatagtggtccagggacagtgttggatggttgtcacatgtcagcttctgagctgagtgctgtgtttagctcctagctggcctgttagggcagtgttagtctcacattcccgatggccaaggaaagcccaagaggttagcggacttgcctatggtaagcagcaaaggatgctaggacccactttccctaaagctgagggtccagctctggcctctcatttctcctggtcacttcccaggccagtcacctgcaaatggcatagtcgataggtgttcaggggcccagaccacacagatccaggaagccccatgccacatcttactgacagagcaactggcctctagagatagaacctttttatgctgactagaaaacagaaaaccagagaagggagagaaaaagaaacccgttttcaaaaataaaaattctgcattgttaatttcatgccagcagaatcagaaaaccccctttctactgtttccccttaaaagcccctgcgtccttattatgctggctcagtctgaaaaaaaaaaaaaaaaaacctatgcttgggttttgcctatgcgaagcttaactctgcagctgtggggaggggctccagccctttcttgtcggcatggaaactttggctaaaactcccccaatcctgtctgaatctcagttctgaaatcacgttccactctgaccctgaggcctgattctcctcagtgtgcctagatcgtgttcggcattaccagaggaaggatccaagttaggtaagaggaaggacttctgaaacagcacagcattgctggggaaatttctcaaagacctggctacagatattttgatgaagaggtaaaaactctagccctgcacgagttctttacagccaacaggagtccccgggctctgtaaagacatacagcacacccatcggacatgctaaaaataagatccgcactccatcaaaccgttatctttgcccaggacggggtggtaatacatgacacgagttaactggtagcagcatggatggagtaaggagttgcctacctaccttccacttcccttgtgaccctagcctgataggtgagccactgagccccaagtcatcctttcctgggctaagtggattagctgaggttgtgatcttaatgccattaggtctgttggcacgaccctccttgccatcatgagaagcagatctggcctaacgtaatggccctctgggcaatccatcaagcccggagtacggggtgtgggagcgttactagtgttaatttgggggagtcttttatggtgactgggaaagaaatggaaggatggttgggaatttatttattcaagccattcagcaggttagcggctgctggggtctacagaggccaccccctcccccatttcttcaaggaaggcccctccctaatccctgaagcccgggcctgattacttccagagttggagccaggacttagcaggctcttgtttctcgctgaggcctccttattaggagcacctggcatcataagcctctaatgggaaccagcgttctcctcctgcgtgaccggtgacaagtcgccctgtcagccggggctcggccgtgcgaggaagttcttattagctttatggtcaggagggcttgtcctgttcaggaaatgaatgttgccgctaaaggtcctccaccctgacctcggcggtgtaacctgtgcgggcctgggagacccactcaggatgcttgggactgtagcctctctctggttctcgtcatatgtaaagaggggctcattgtggtgtgggtgcagccttgaacttttgatttatgcagtgagagtgacttaaccctttctgagcctaggaggctatgcagtaagtaagacccaggatgtgtatctagacatatgcgagcccttgtgggtgtgtgcatgtgcacgtgtatgtttgtgcacctgtgtgcacgtgtgagtgcatgcctgtgagtgtgctcttgtgtgcacctgtgtgtgtagttgggaaagaagacacatcacatgtcattgggctgttaatggcagggagtgttttagggtcttttgtctgtctgtctgtgtctgtctgtgtctgtgtctctgcctctccctgctccatccctttctcctagatttctcacaatggttggctgcacagtggcgagcggagaaaacgtggtgtctggaaatgaggatgggttcttctcgaagctgtgtggacagggcggcgttcccagacgcttgtgtctgggtcaggagggggaagtttaggagcatgccgtttggcaagatggtatcctggtcagtagggtcatggggcacacaacacaaacatgtagcccagtgcaggtgctcactggccctgggactgttggtttgaaaggacacgcacctctctttaacgtctccctcatgaagtcagattaacagagttaaagaatagtgtgcgtgtttctcttagtacatcaaatgtgctcccctctgccccctcatagttccaagtccttaaagcaaggtctctctggttgtcacatggtgtcccccccccccaatgcctgagggaatgtttctaaatgcgacttttttttttttttttttttttttttgccaagaacagtggcgtctgacctcattcttaacggaaactttctgcctgcttcgtttttaaagaaaagatatttgtgcgttgtctggccagtggatgttctacttggtcactactgctggtttaaagtcctctggtgacaaaggaatactgcaccttaaggggaggctgtggagtgtggcctaaaaaagaggggtcagcgaaggcaaacacctccttgggaacctcacggatctgtctctgtttgtagcctcgttgatggcagctcacagaaaaaatacaaattagtgtttttcagattgtggggttggggacaaagagaaataacatattggtcagccacgtcgagtccattaagcccagggttttggagactgcgatctaagcctgtttcagggcccacacactggaagcaaacttacttcctcttagacttttcttcttcctttatgtagcaaaaccacacacatctcatgaacagttcctgcgcagcttggggagggtgaaagttgtggaagtcaccggccacctcggggtcagaaacacacagtgtcgtcctttaaaatgatctgctaaaccaaggctgcgctaacatgtgaatctacctccctgcatccattccctcgcccctcgcagagggactgaaggtggtacttaaatgcagtgggaagctaaatcaaaggagtctaaaaccacttctttacctgaagttccttatgggaaaactgactgggcctgtgctggctgcaggctctgtagggcttccagcacagtgggtttggggccaccactcactttttcataattatcttattttactttctgtgtcctgacagctataagaacgtgtttggttttttttttctctccctttttgccaagttgcagataaataccacctccccaagccagattcagtggtgtgtgtggggtgcagaccagaacacatcttggcattccttgttgcaaaagtgaaaaatatctctgtttgtagttaattttagtggcaagcagatcatgttaactgggtgtaattacttccagatatggccgagggttttgtgtgttgggatgaagggcctggtaagtgctcacttcctgtgtaaattagcctcttccattctgtctttcattctggccagccctggactgtgtcattctcccgctctccccctcccagcctgcagccctgggggtgagactgcttgctctgtccttccgagtgtaattcttttgtcacttgcagacacttgccttgctgagtttacacttggaatgagaagggttttaaaaggtcctcactggtgccccgactgcctctgtcccacagataggtcctgagagtgtaccctagtcatgcaggctgcatcttagcaatcagaacgtgtgtgtcagcgtgcgcatgctcacgtatgcatgcttttatgtatgtatgcacatgtgtgcagaggtatagatgaatgtgcatatgtgtatatgtgcatgcacgtgtgcaccctccacttttattttttggggacagagtctctcaaggcatgaaactggctgattagatgatcagattgactgtccagcaggccctagggatctgtctgattccacctccccagtgccggggttagaagggtccatcaccacatccacttgagtgcttgtgatagaactcaaatccccacagttgcacagcaagcacttttccaactgaaccatctctgtacccccttatttttagcggatttttttgtgtcacccacaaccctctccttttggagactccactgccacccctgtctgtctgtcagacggagtatatcttcagatgtcctgggactcactatgtaaaccgagatgactcaaaactcatgcctgcctgagtgccagggttaaaggtgtgcactaccatgcccagcagaaccatacggtcaaaagtctctggaagatgccaaacagtgaagctatagccagagacaggacttatgtgtcccatgtgaaaccactaatcttgacccaagaagggggacccacgcatgcacagatcccggtcagaaaaggagacccacctgagccgtttctgccaagttatctgggtccccgggattagaatggaggagaagggcattcaactcaagttctcctgaactctgcttctgcccggtggccagcattcttggtgctgcttgaataagaggtgactgtttatcatcctgcatcggctctactgataacccttgtggtccctggaacaatctactagagctagatggcttgataagggccacctttctccgtgtgggaagataaactgtaggggtcaggtgaggggtggtgagttaggcgtagcgacgggtggaggctgtcgatggggtgcagttgtggggaagagcttgaaggaggggactgtggtggcccttgggtggctgcattgatctcgtggtgtcccagtttcctgccctcacctctttcccccctgcttcatggaaacaattatagactcaactttgtgttcagactggggcggtattggccatttttgcctcttctgtccttcccttctcccagtcttaaaagttactaagatgatgtccgcctgagctcttgtgcctatccccagtccactgctcttgcaggaagcatctaggcaaaggagaaacttctgaccctctcacctggtcaataagctgcctgatactcaaacaaaagagtttggactggctgctaaaggcagggtacccagctgatagctttgttttgatatccttgtggtgtttgcagatcacggagtgggctatttagagcagggggtatctgtggaggcagactgcctgggaagcacaaagtccaagagattgagagatagagtcaggcatcaagcatgtgtgtgtgtgtgggggggtggtggtggtggaggtggcgtggggtgggggtggtgctgggctcctggatcagaagagacattttctggaaggtgatgcagtgctaattttttagtcactgttgagctggtgacaaaagcgtcgtctgtagagtgaggtatgagggccaagaagccaggcactaagatttgctaacggtgtacctggataagctgcacagcctctctttgtctatggcctcgatgatgtgttatgtttcagatcctcagctcggggaaggtgctggctggactggagctctagagttatagagcttttgaatgctgctcttttggcccaaggaagaggctgtgacaagaagtagtcgagttgtgactgaatggtgtcagccctgtgctagcagccagcgagtgaggtcataggggatcatggaagtgcatcaggaatggaagggtccccgctttgcctggggctagggctctgttatataagattgtctagcacacatggggccctgggttcgaccctcagctctccataaaccctagttcagtggtgcatggctgaagtcctagcaggtgggatgtggaggaagaaagataagaagctcacactctgcctcaggtggcatagtgagtttgaggccagcctgggctactttagatcttgcctcaaaaacaaaaacaaaatctcccaaaataagaaacaaacaacccccccaaaccaaagaccgaaccaaaacaaaaaccccaaaactaaaacaaacaaaaaaaccccaagcaaaacacatcaagtagtctaccaattaaaggtgtctttgcagaaagctagcattgtagagaccatatttatcctaaaagtatcttgaacccagcattgctgccaccactactgatgtttgggacatccagaggacttgaagtctacactgtattcttttgccttgccttggggagggttagcttagactttgggaattgatgactcttgggaattttgtgagtggtgaacactgtggtggggggccatcctgggaaggcaggatttgggaggggctcaacccctgtaaatactgacttcacttcccagcttagggagtggacgagctctggctaagacccctctgattactgtagtgtttctgtggttgtggttcagcctcctgtgagtttgggttcctgggaagtcacatggaatcacctcccccactcacacacacgaccccagacacgcacagctacacagacagacacacagaaacagacagacagaaccccccccccccgcacccctacctgcaacttgggcatcaccaaataaagatcagagttgagaagaatggactaagatgtaactaaggtaatacctaaggcaggttcagagcctggttttgaatcctggttgagccttctgggaaggttctagaaggccaaggagcacatgtgttcaaattctaggctggtacccagcacaaactctatgtgggggtctcagttccctttcctaacagtgttccgaagtcgggatgggggccgtttgcttcctgtctgcagtggtgggaagcagcccctctgaacacaccttaggctggtggttctgtctcactgcagtgacctagcagtccggctgggcagggcccaggctcagcctgtgcgccctcccttgcattatttatagtaaaccccatgagcacagagtgctaaagcggaagggtgagtcacccattgaaaccatcgatgacataaaaacaagcaaaatgcttactgtgtgttttgtgcggtatttcagggcaggttgtgctaatttgaacactcctaaactggatctgtgaaagtgtacatgtgtgcgagtggggggtggaggggggggagagttagagttcagcctgagggaagctgggtattgaaaatctccttccagttctgccctctgtcctcggctgccctcagatccctcttcaggttccagaggagtgctgactcccttgctgtggttcacctgtgtctctggagggttagagagtggcacggtgggggaggggttagactctgcctcatccttgtccctgttcttgcttcctgcggaggaaggcacagtccctgctttacatggacatcgttcaggtgtttgggggtgactaagaatcatgagagcatgtaagagttgacaaggtcttttggagcttttatttcaaaacgtttgtttcaggaggagttactaagttctagggaggctctgtgatttgccaaagaccacatagcaagctgtcgggcagactaggactagaaagcggggctgtcactctctgtctctgtctctgtgactctctgtccccttgaattccttctttccagccatatcagggcctgcccaggcctgcttcccacttcctccttactagaatctgacttgagaactatttcaaacctttgtcactgagcaggggtcaggtgtgttttggcatagggacttgagtttgccccttccccctcccctaactcccagcctcttttctgtcaatctgagttgtcaaatgtctgtcaagtctgtcgttggtgaggggactatcagtgttggggtggggtgggggttgaaatgcaaagactgctaagacttgggtcttgccctagagcttagaatttgagcagagttaaaaagtatttggagggctggtgagatggctcagtgggtaagagcacccgactgctcttccgaaggtcaggagttcaaatcccagcaaccacatggtggctcacaaccatccataacgagatctaactccctcttctggagtgtctgaggacagctacagtgtacttacatataataaataaataaataaataaataaataaataaatcttaaaaaaaaagtatttggagacgatgggtggtggcggcacacgcctttaataccaacactcgaggcagaggcaggtggatctctgtgagtttgagcctgatctacagagcgagttccaggacagccagggtgacccagagaaaccctgtcttgaaaaaccaaaaataaaagtacttagagagtatgtgttggcgtctgcaatggagtggaaggtaacggaaggaccacacaggagagccatgtatagctagatgagtcagcttcccttcgcactggagatgctttagtcaaaatgcactgagttcatttgtaattatcactgagctggaccttgcaacaaagtcccgtggggtcttgcttatggtgagaaacatttcacccagtaaccctacccagtaactgtggtatggtaaaagagaggcagtcccagaattctggagagagtggcagttgagtgggttgttgaaggacaagttgaattcagggtatggtggctcacacctgtaatcccagcatttgggagttaaggtgggaggagacctgggctactgagtctaactctgtctcaactacctcttcaaaccccaaagtaggatatgtttttttgtttgtttgtttgtttgtttgtttgtttgttttgtccagagacatggtttctctgtgtagccctggatgtcagtcctggaactcactctgtagaccaggttgtccttgaactctgcctgcctctgcctcccgattgttgggttaaaggcttgtactgccgcatttggcatcccaaagtaggatttaaagatgaaaagtgggaacatgtggtcagacccaggagacagtagaaaaatctctcatctgccagggcccagggtcatcatccatgttggggtgtgtgtttgtgggttggtattccttggggctgccctaaatgttggaccaggcctaaagaaggcagagaatgaagagggtatcagaggaaaccccctggacactcagtaaacccaggttcaaaatctgacccttgtagatactaaatccaaaagtgtcagtggagaattctgaggatttcagcttatgtctttttttgtttgtttgttttgttttgttttgttttgttttgttttgttttgttttgttttcgagacagggtttctctgtatagccctggctgtcctggaactcactttgtacaccaggctggcctcgaacccagaaatccgcctgcctctgcctcctgagtgctgggattaaaggcgtgtgccaccatgcccggctcagtttatgtccttaacttcaacacacagcgcagggagcagtgtaattgatcagcaaatgtaacggttgctcagtttgggctatatcctgggatgactgggaccttgggaggtgttctgagaaggaccctggctagaagagcccatactgattgtcacctccaccgggtatgccttttactgtccccagctttccccctatcttttagagttggcctgagaaggagttttgagggtaactgatggtccctaaagagagttcctctcctatctgacactccaccagtgaaagacgaaataacccctcaccacctcatctctgaaggcagagagccaaggagctctgagaaagaggggcttcagcctgcaggatcagagaaatgacactgtgacgcgggtcccagactgctaccgatcttcttttttagtagcaatgtgatagcccaaagttagactaacggtcaagccttgcttctcgcctacactgacagtggggcagagctggaggctatctgtcacagcccgttccgggctgtggttgtcacaccatgcaatgtctgcaaaccgacagtggccaggggagataagggcccccgttgtgtaatgagagccgtgggctgtttgcccgatggatctggcccctgggtaactgctaacctcaacggaggggcggctggcttggcagcgcccaggcccccttgccgacttgcgggggcctttttgtggttggataaaggaagctcatatagactgcctgcagcgtggaggcctggcccacagggctggcaaggctctcttctttgtcttttttgatgttgatggttgatggagagagggagagagagagagagagagagagagagagagagagagagagagagagagagagagagagagagcgcgcagagagtgcacacgcacgtgtatgagcacccaaaagggggggacacagtttgtctgggcatctcccatttcattttagcataaaataaaatgaatgttgcaagctgaaagtcctctgggccctgggtccttgtaactcaggagctttgactgggaaggaagcatggctgaagtttctagaagccagcagatgcttgcaggagcagcagagggggctgtgttgctgttccctccctcccttcatccctggatgcattggtggactccagcatgtgtcctttgcctttataggagagccagagccagaccctcggcttcttctgtgttcagtttcatcagctggccactggctgaacctgactgaggtggtcacctgtttgtcagtttgtcacctgctccatgtccccccatcagagaggctttgtgggtctctaagcaccttgctctatttccagggttcttgatgctccctagcaatgcttccagggaaggggccgcagagaccaggctgaagcccctggctgtattctgtatttgtgtctttcctatccgggccatggtttcccttaaaccatgatttcaactcccgttgttattctcacaaccctcttgtgagtgtctgaatttgtaaaacttttacatccctgctctcctgctctgatcacatcggggtggttatattccgtggcctaaccacatggatttgcccagtttagaagtgaaccaggttctcaccttcattgtttaacacattaggcttgcattaataatgctctcctctgagcgtctctttcctgttatttgtactgtgtgcgcttggttatttccgagctgtctgattgatccccaaggtggaggtgatattttttttttctcccagaaagggtaggtatgttctgtttgttcccattagcgtgaatggaaggtccttttcgttggaggttgctttgtgtccatcatagggttctggctcagggatgggcagggacaggagagtggtgatttaaaggattcagaggcagtgactcctattgattttagcttatctgaccctttagcttgaggctgcccttccctcaaagtgtacaggctggctgtgagttagagcgactgagaaatgtaacatatgccatcccttttccttgcattaattagggctgagaaatccattatttagagggatctcaggacctggaagaaggctctagagcttgctataaagatctggggccagctggaagattcccgggtagcagttagacagaggaggtaatgctgggaaggagaagggacaggtgccatgtgggcaggcaggcagacagacagacctggctcttcccctgtataggggaaccaggctctcacctttactgtctccctgatttcatttcaaatattcatcaagatctgcccacggccagctatggtggtgcacacctttaatgccagcattcaggagacagaggcaggtggatcactataagttccaggacagcctggtctacgtagtgagttccaggccacccagtgctccacagtgagactctgtctcaaaaaccaatcaaccaaacaaccaactaaccaaacaaacaaacaaaaaaaccaaacaagtgtccactcagggatggcaactgtttggagaatcaccaggagagggcggacatagccgtggctattcaagtcagaaaccatttttattgagcacttactgtgtgtgaagtggttgctcatgctgtagagaagcagaggacctaaagagatctaaactaaaggctacagcaagacaggaaatgacaactgtatgtgtcctggggcgtgtggtgtgtgctgatgtatctgcggacatgctcaactattgcatgagtgaagctgaggagggcagaggagacgggtcggggcaccatgctgatgggagacttagtagggcttcctggaataggtggtacctggctggcccttggaggatatctagggctgtagttgtcatctgtaaacagggggtgtggggagggggagcagagatgtggtcgtgtgagtggaggcagggatggagtcacgtgctagagtggaggaccagtgtggagtacagagcctctgagggagagtgagttggggccaggcctggagtgctttggctgctgcggtttgtaaagtgtggctggttggggttggacccttgctcaggatgctggatcctctgtggtcacctaccttccctataggtctagtggaggggctggctgatgaaggggtccttttggagacctgagctttctcaggtgctctgatgtcacggaatgagaacattgctattagacctttctgacacttaggggttttttttcatgtagcccaggctagccttgaacttgttacatacccaaggataaccttgaatcctgatccttccattttcttctcctgagtgctaattataggtgtgaaccaacacactcagtttgtgttgtgaacccaatgcttcgtgcatgctaggaaggtactcttagaactgaccacaccttcagtcatgaatggagacattcaactggccactcacacatggctccttttcatgatcactttacaaagatgttccacggcagagcaaactcagtcctgggccttgggagagcaggatttggactgaatagctttttgtgaatagcactcatatccacttactggcttatggctacctgaatcatcctctttctgtgtttgtcccagtcagctttcaagacctggcccaggcaggttcatctcagctgtgccaccaccctggagctagggtcctccctcttttctgtttccggcagcagttggagcttacaccatctgcccatgatctctgctgccttttctcttgtctccttgtctccacatctctttcttggtagtctcatggtttctgtgaatgcctctctaatgaaagcaagtctcctaatattagttgtttttttttccctctgtgtgtgtgtgtgtgtgtgtgtgnnnnnnnnnnnnnnnnnnnnnnnnnnnnnnnnnnnnnnnnnnnnnnnnnnnnnnnnnnnnnnnnnnnnnnnnnnnnnnnnnnnnnnnnnnnnnnnnnnnnnnnnnnnnnnnnnnnnnnnnnnnnnnnnnnnnnnnnnnnnnnnnnnnnnnnnnnnnnnnnnnnnnnnnnnnnnnnnnnnnnnnnnnnnnnnnnnnnnnnnnnnnnnnnnnnnnnnnnnnnnnnnnnnnnnnnnnnnnnnnnnnnnnnnnnnnnnnnnnnnnnnnnnnnnnnnnnnnnnnnnnnnnnnnnnnnnnnnnnnnnnnnnnnnnnnnnnnnnnnnnnnnnnnnnnnnnnnnnnnnnnnnnnnnnnnnnnnnnnnnnnnnnnnnnnnnnnnnnnnnnnnnnnnnnnnnnnnnnnnnnnnnnnnnnnnnnnnnnnnnnnnnnnnnnnnnnnnnnnnnnnnnnnnnnnnnnnnnnnnnnnnnnnnnnnnnnnnnnnnnnnnnnnnnnnnnnnnnnnnnnnnnnnnnnnnnnnnnnnnnnnnnnnnnnnnnnnnnnnnnnnnnnnnnnnnnnnnnnnnnnnnnnnnnnnnnnnnnnnnnnnnnnnnnnnnnnnnnnnnnnnnnnnnnnnnnnnnnnnnnnnnnnnnnnnnnnnnnnnnnnnnnnnnnnnnnnnnnnnnnnnnnnnnnnnnnnnnnnnnnnnnnnnnnnnnnnnnnnnnnnnnnnnnnnnnnnnnnnnnnnnnnnnnnnnnnnnnnnnnnnnnnnnnnnnnnnnnnnnnnnnnnnnnnnnnnnnnnnnnnnnnnnnnnnnnnnnnnnnnnnnnnnnnnnnnnnnnnnnnnnnnnnnnnnnnnnnnnnnnnnnnnnnnnnnnnnnnnnnnnnnnnnnnnnnnnnnnnnnnnnnnnnnnnnnnnnnnnnnnnnnnnnnnnnnnnnnnnnnnnnnnnnnnnnnnnnnnnnnnnnnnnnnnnnnnnnnnnnnnnnnnnnnnnnnnnnnnnnnnnnnnnnnnnnnnnnnnnnnnnnnnnnnnnnnnnnnnnnnnnnnnnnnnnnnnnnnnnnnnnnnnnnnnnnnnnnnnnnnnnnnnnnnnnnnnnnnnnnnnnnnnnnnnnnnnnnnnnnnnnnnnnnnnnnnnnnnnnnnnnnnnnnnnnnnnnnnnnnnnnnnnnnnnnnnnnnnnnnnnnnnnnnnnnnnnnnnnnnnnnnnnnnnnnnnnnnnnnnnnnnnnnnnnnnnnnnnnnnnnnnnnnnnnnnnnnnnnnnnnnnnnnnnnnnnnnnnnnnnnnnnnnnnnnnnnnnnnnnnnnnnnnnnnnnnnnnnnnnnnnnnnnnnnnnnnnnnnnnnnnnnnnnnnnnnnnnnnnnnnnnnnnnnnnnnnnnnnnnnnnnnnnnnnnnnnnnnnnnnnnnnnnnnnnnnnnnnnnnnnnnnnnnnnnnnnnnnnnnnnnnnnnnnnnnnnnnnnnnnnnnnnnnnnnnnnnnnnnnnnnnnnnnnnnnnnnnnnnnnnnnnnnnnnnnnnnnnnnnnnnnnnnnnnnnnnnnnnnnnnnnnnnnnnnnnnnnnnnnnnnnnnnnnnnnnnnnnnnnnnnnnnnnnnnnnnnnnnnnnnnnnnnnnnnnnnnnnnnnnnnnnnnnnnnnnnnnnnnnnnnnnnnnnnnnnnnnnnnnnnnnnnnnnnnnnnnnnnnnnnnnnnnnnnnnnnnnnnnnnnnnnnnnnnnnnnnnnnnnnnnnnnnnnnnnnnnnnnnnnnnnnnnnnnnnnnnnnnnnnnnnnnnnnnnnnnnnnnnnnnnnnnnnnnnnnnnnnnnnnnnnnnnnnnnnnnnnnnnnnnnnnnnnnnnnnnnnnnnnnnnnnnnnnnnnnnnnnnnnnnnnnnnnnnnnnnnnnnnnnnnnnnnnnnnnnnnnnnnnnnnnnnnnnnnnnnnnnnnnnnnnnnnnnnnnnnnnnnnnnnnnnnnnnnnnnnnnnnnnnnnnnnnnnnnnnnnnnnnnnnnnnnnnnnnnnnnnnnnnnnnnnnnnnnnnnnnnnnnnnnnnnnnnnnnnnnnnnnnnnnnnnnnnnnnnnnnnnnnnnnnnnnnnnnnnnnnnnnnnnnnnnnnnnnnnnnnnnnnnnnnnnnnnnnnnnnnnnnnnnnnnnnnnnnnnnnnnnnnnnnnnnnnnnnnnnnnnnnnnnnnnttcatcagtcctcgggcacgatctctcatggtgtagtgcctggtttttggctgatggaaaggtggtttcgagacctgtgtagcttaggccatgtgtgggcagagcttccaaatctttggttcagagttccagcctgttgggcctccagtccaggggatctcattctcttggtggttgtgtgggtgggtgggggctctcctttcctggtcatgcccaactggaccctttggcatctctgttgtcccattttctgcaagacacaaatggccagaccaggcccttgttttttgttttgttttgttttgttttgttttgttttgtttttctgcagcatttttatgtccattggaaagttaagagaaatttgttaatgactttgttatgttcccctcccatcctcttctttccccttgtggagctggttataaaaccgagagccatatacattttaatcacgtgctgtcctattgaaccgtatacctaatggttcagttagcatagtgggcccaagtttagatccaaaacacaaaggtttgtgcatataatcccatcactggggagatagagataggcgtgttcctaaagctcattggcccgtcaggagagaaaccaaagagctacacgttcgatgggagactgtctcagaaacttgagacaataatttctcaataatcatggaaggtagtattgacctatgatcttcacatgcaagcacatacatatgtactaacacgtgaacacgtacacatgtacaccacacacataaacagacacacaagcatccatacacacagacattttatctgttttattttgtcttgagatagggtctcactaagttgcctaggttggcctggaactccctgtagcaaggtgtgccttgaacttataatcgcctgctttagcctcatgtgtagataagatcacaggcttgtgccaccagacccagcatgaatccaccccctctgtccctctctctctcctttgcctccttctccccctctctctaaatttaagatttcgtttgtcttctctcttccccttccccgagcagaactcaagactgtctggggggggggggtatggggttgggctaggggctgtgcatcctcctctctgaccatatacacagagcagagtggttttaatgaataaataccaccttctcatgcctttgtcagtctacctgcctcctctagccatgaacttccgattcttagtctgtgtggggcaggtcttgtcggggtagatgctgatggccatggtagaggtagatgcggatctgtaggttgcttggggaggagcttcctctgttttatgagtttggttgctacttcattgtgatggtttttcacttcgaatttctctccccgtttccctagccccttgtgtgacgtggcttctgtttgcactcgaggcgtgctggtgcagtttcctctatgtgtggccatggctgagagtggactctttggtttctgcagtctgctagacaaagggaatgaaacccactgtcttaccttctcactctcgccgaagtccagcagcaggctttggggatgatttttccctgggatgatcttaagtcttgaccaggccatgtactgctgcttccttggcaccctgaggccagcctgggcttcagggacctgagggtcattggtgtctggtgggctgggtggaatgctagtctgtgtctcagttccattactgtggagaaaagcaagacaagcaggcctctttagctcttagtaccctcttaccagtcctgatcttggtgaaagggtgatgtatttgtgcacttaggtcttccagggctggctacaaagagtggggagtgtttctgggcaatttgtcctaacaatcagtttgggttgagggagaagagccggtaaaagaaaggcctggactgtctggcagatagagaacctggtgtgtgtgtgtgtgtgtccccatccatgtgtgtgtgtgtatccatccatgtgtgttgtatgtctgtatctgtgtgtgtgtattgtatatttgtgtgtatccgtgtgtgtgtgtgtgtgtgtgtgtgtgtgtgtgtgtgtgtgtgtgtgtatgtgtacagctctggctactcttgactctgttcctggtcaggacattgagtagggctgatcctggtcctgcctttgctggaatgatgggattcccacccccaaccccagctttgttgcatggtctgggcatatggacatcttcactgtgcatggaaataagcactagaggagattccatctttctctcactctccccatggatagcagcttactcctcatggcccttctccctgtccctgtgttgtcttttggtttagatttttttctttgtacattaaatccatctgcagcactggaaaaagaaaagaaaagagaaatcatactagctctttgggacacgtctcatgtataagggctggttctttatagagtcatcaagacttttttttttttttttttactttctgtatttgtgtgtttggactagtattgatgtcagtagctcagctactgcaccgttgtctggtgagcgcgtcagcataggcagtcataaatactgctgtttggatcttgtggtaaaacagaaacccagtgggtccacttatctaatctgaggtgagggttcactcaaacacagagggaggtttaattcttttggttaataagggacatatgccgtccctgtgggttgcaaagccgtggctgtctgggagatatccatgcctctaggggtcagtgggaaacttgggtgtgcaggcagtgggagggaggcctccagatggggccactagctcagcaagtttccgtgtgggcttaggcaccgttgctagtaggcccctcggtgcctttgtgtgaattagaaaaagtgcccatcgtgtgggaggatgtggttcttagggcctgggacatgataagatggacctctctggatcttacatctttttgcccaccttcccatcagacacctgagttcccgggcccgagagtcttttgtggctggagagttcctgaagtaaaaggtgttttaaaacgtgagacacttttgaactcttgagtttctgaaggttgtggtcttcagaatccgtttttgataatccctcagccaggttgggccctcaggtaaccaagcagtttctctagggcatgcggcaccaggctgcaggtcactgtacctaggtgtgaacaagatgtgaggcatctctggatgctcaggtgtcccaagccagcttgggaatgtcacatggaaatgggggcatccttttagcatgactgtctctcgtgaccaaggccaagaaaaatagcacagaggtaggagtggtgaggaacgaagacaagtgcccacgtctcacagcctcaggcaccacagtccttaggctccgcctggggagagcacaggtcttacgtaatcagattctcacttgacgataatcagcaatgaccaggagacctgttctttgcgcagattttgagtctttgcaagaagatccaatttcccttcatacttgatttgtctcaagtctgtgtcttgcatgtgtgtgtgtgtgagagagagagagagcaagagagagagagagcaagagagcgagcgcacaactatgtatacatatatgtggagaccaggggttgacatgcgatgacttttccaattgttttcaatattattttttgagacagtatctctcactgaacttggagcttgcccatttgtctaggctgtctggctagcagacgctgagattcttctgtctttaccaccccagtgctgggatcacaggtgcaaccaccacaactttttttgggggcggcggcggcggcggtggcggtgggggtgggtgctggagatctgaactctggtcttccctgtttccatatcaggggcttcactgaccggccatttccacaggctcatgtttgggtcttttaaaagctattgctgggcccagtctgacgggtggatggacatacagcacacacagcctgggctgctatgccacagcatacttgggcactgagctgacaagctaccgaagtgcccatgggaagtagaccaggcccggagaataatttccatttaactaattattattcttactccaatagatttgaaatctatttaacttttcagggtctcctagccttttaagtgtttcaagtgcactctctctgataggttacctttcctctccctgtaggctataattagtgtcctttacacaaaattggcttagaattggatttggagaagataagaatcaaattaccagtatttatcttgtaaattccaaaagatctacttaagacactgtattaaaaaaagagaaggagagagagaggaaagagagagagagggagagagagggaggaaggaagggagggaggacagttttgtcctaagaaaaagcaaattccttgtggtctgaacaatccatagacattttaatattgtatttccaaatttcccatgtatttccaaaattcccatgcagaaacctaaaacctatgcctctttttttcttctgttttgttttgttttgttcttttttttcccctcttcagttgaacatctgaaatatgttgccgagctttgaacagtggagagatgtggtcccagctttcagtaaaactcggggagtttggctgatctcttatctctgtcttgtggtgagatgtgtaaacctctcaagtatcttaaagagataggcacactttttaaatgaaaaaaaagttgtgtgtgtgtatgtgtgtgtgcacgcgcgcttatctctctgtctctctctgtctctgtctctctctctttgtgtgtgtcagtcagaggacagtttggcaccggaccttgccttcccctttgattgacatgtctcttgctgtttgtggctgtgtagaccagactagctggcctgagagcatgcaggggttctccgagatccatcatcccaccccgggtacctcttcacatgtgtatggcaagtgctctccctaccaaggaaatagacgggctttatgctagcatttgaagttaaaaccggtggcaccagatcttggtgggggcgcggggtgtctctgtgtgaccatttaccctgtaaacatcacggtgttcctttgcacaggcggtggagtttgaagatgtctgtgttagagaaaacaccagcgtttacagcactttctcaaaggtactgggtggagagggcctgtggaaagcgttcattagctggctcaaaatatgctccgtactccacacgtcttttactaaattgctccagtggcgttgaactcttttaagttttcctctgtcaagttaggtaaggcgaagtccccgtcatgtggcagtggtggtgcgtctgtgaccacctaccttctgcgtgactttctggtttagtaacgtcatcgagtttcctagcctaattctgtccttttttggttttgatgagagtgttggataccaaagagagaagggggaaaaaaaggcaaattctttaaaaggaacaaaaatatgttttgtgagcaattctacttctggatatctacccagaagaactcaggcaggactgtgaatagaacttggacgcccctcgtcacctcagtgctattcacaatagccagaaggtggaagcaacccacgcacgcttaccgccacatgggttcgcagacagactgtgtggaatactattcagctttaaaaaggaaggacattctggttcgttgaatcccacagatggtccttggaggcgtgatgctaagtgagataagccagacacaaaggacacatattgtatggctccctgaagctcagataccaacgttctatgacgtacactcatagagacccaaagtagaatcgagatgagaggagcgcgcgtgctctgtggggaccaagcttcagttggaaggcttatgctgttggtttcagagttttatgcatgtaccaaatggcactgaactgcgtactttaaaacagttcagaaaacctccctattttatgttgtgtgtatttttactatcataaaaacatgtttgatgctaattgctacacctggtgcttgagacaaaagtttcttagaaaatacttagggcatcatgctataaaaaaatcctcttgctagttcacaggagcacataggcatacccccccccccaacacacacagatgcacactctctcccttcctgtttgttagttatcaccctttctcatactgtcctttaaatgtcattgttattagcacatttattattgttgttggggttttttttgtttttggtttgtttgtttgtttttgtttttttgagacagggtttctctgtgtagccctggctgtcccggaactcactctgtagaccaggctggtcttgaactcagaaatccgcctgcctctgcctctcaaatgctgggattaaatgcgtgcgccaccatgcccagcttactaccgttcttaaaagtcagtgttttgccatgtagctcaggatgactttgaattaactgtgatcctcctgcctcaacctcccaactgctgggattataggaatgccttgccaggtctagcagatttaaagcatttgcttatggtactggccttgttcgtttgtcacataagcaaatgtggcaccctgaggctttatccctccctccctccccacccctccctgagaatagcagttttagttgttttggggtgctgggggttgagcctatggtcttgcacgtgttggacaagcattttaccacccagctgcatccccagcccttgctttttttggccggttttatcagatatgctggttatggcatttgaactgtcatttgtgtttatgaatagctgtcgggcaaagcgcgcaccatagtgtgttatctcttaggccacactgaataggtacttgacctccaatagaattctaattggatttctatatttactccttgttctggtattttttaatgaaacatttttgtttgcttgcttttgttttgtttcgtttttctttttctctttcgttctctctctctctctctttcagacagggttggtttctctttgtaatcctggctgttctgaaactcactctatagaccaggctggccttgaactcagatatatgccagcctttgcctctgagtgctgggattaaaggcatgcattattaacctccccccacccccccacccccaccctgcccaggctgttttgttttttgaggtgaagtcttactaagcagcccaggctagcctgaaactcaggaatctgcctgcttggctttcctagcactggggttaaaggcgtgctgcaccagcccagcccagccccccccccccccaagtaattaaaaaggacattcaacccagtttgcaaagctacacgagaggtttaggagagtttaggttgggcccctttgtgagcaggctttttccgggcttacattcccctcctgtgatagggcttacctaccctacaacctgttgcaaatttagcctgagatttttgtgagtttcagagcagaataaactcccccccccccagctttttttgctctttcttctccatttgatttccacttaaatgaaaatgtaaaaactccccaaaaaaggcaaagcaaacaccaaattccccgaagtagttagaagggaagagtcccctccccaacctccctgtgcccccaaggcacggaacagggagcagtctcattctgggcttctggaggctcaatggccagcatgtgtaggtatggggctcaccatatatatagtaccaggcgtgtgggcgcacttgtgggaaatctgaaaaaacatcatttggcatttctaggtttattttaatcttacaacctttaacgccagacacatagctgctttcccacttaatgtaactatacattgattgcttttaattagtgttggatctttcttagtgtttcacagcttgggatatataaaaagtctgacttaaattaaaagaagaagaaaaagaagcagctaactctttgacagtctcttgagtctgagagaagccagcactggagtcctaacctctctgcctcttattcttgagttgtgtgggcagtggagccctggaagagggcagagggcctttcctcttcagaacttaattaagcacctgtattgaaataaaggtggggaaggggcccccgttttcatagcctagccaactgatgagcgatcatgctggagaagtggggtcttgaccagaagaaaggggtggggtcttattccttcaacactcagggactgctaaggctcatttctggtttctgaggcaggattctgcatgtttgctcccaaccctctgtggccctggtgaattctccagtaaatatttcagacatcctcgggcctgctttcctctccctgcagtaaattacatattaaagtagcctggtaactgagcactggttgctgtgagataaggcctgggaaatcaatatgtttgccatgtggctgcttgtttatgacacctgcctctagaacagttgagcaatgttctgtttgttaaggctgcatttcagaagccggcatcctcctaaaacacccgagatcttaacggggagagagacgtgctgcacagatatcgattttagtttttccaagagtagaattaagcttggaaacagtgctcacagcccatgaccacccccccctcccctggccccagagttgttagcacaaagggaggtggatcctctgtcgtgtgtgtgtgtgtgtgtgtgtgtgtgtgtgtgtgtgtgtgtgtgtgtgtgtgtgtgtgtgaaagttatttgtatataagcatcttataatgttacaatgtggtcagttgacagaaggcatgcagccgggaatacagacctgcaggtgttgcttagattttttttcccttccacttttgttacttccacccctctgatcttcctggtttaaaataagaaaatagcaactgggcagtggtggtggtgcatgcagctgtgtgtgccctcaggaggcagaggcaggcggatttctgagttggaggccagtctggtctacagactgagttccaggacaactagggctacgtagagcaaccctgtctccaaaacaaaacacccaacaaccaaaccaaaccaaaccaaaccaaaaacaagaagcccctcaaaaccaaaacacctaaaacaacatgaaaacacagaaaaatgagcacaccaacctatggctagtgaggtttggcctacccgcccaccctccctttctttctcccgaatcagggtctcatggaggccacactggtcccagattcactttgtataccatggatgaccttggacccctccctgtcccctgctccttcttgagtacttagtgataggtgtgtgtcaccacaccagatttatacagtgctagggattcaaccttcatgcatgctagacaagaatgaaggtcctcaccaagatgtaagtctggttgtcctggaactcactctgtagaccaggagggcttcaaactcagaggtcctcctaccgctgcctttacagtgctgtgattaaaggtgtgccctgccacggctagagctggtgggttttaacagtagataagactagctttgtgactgaatctactggtgggcaatacttttgtttatttgcttttttttttttttttttttttttaataaatcaggtcttgctgcattgatatggctggcctggaagttgtgtagtctaggctagccccaaacatctcaaaatttaccatagtcctcctgcctcaggattacaagagggagccatcatgctccccaccaggccaggcttcttaaagccattgaataacagactacctcaaggaagcaaaacgttagcgtgagtgtgcaggcacggttgtgcttgtgttggagggtgagagtgcatgaggctggcagcttgggagagaggaggatggcagcctgggtcctcaacacttagccttccgttttgtaaaagagtagcatcaatacatcgcctcttcttcatccaagtgactgagagggaactagtgtgtctaaacaaactgcgcgggagccactggatgccaggcataaaacctgcattgtgccggtgtgcttgggtgtgccagcggtacacaccccacggtgttccttacctttgtaagaggcatgggcttcctctctcctgctccccatgctctgtcactcagacaaacagacaggccttctcggcatcattgctgtgccaaaaagtgagtttttaaagagaagcacggcctcctcacagagcatgccggaggcagctgccgctaaggtggatgccctgaatattcagtctcgtggacgtggacggcggccatgatctcctaatgacactaatgtattctgaggtctcatggtggtgtttgtgtgtttttaaaatccagattggcaggttctctttaatcaatagtggcaaaatgtctcttttctttctactttccacgggatggtaggtggcttatcggatcctctctctgccgatgcagagtccaagatgacgcaaaaaaaataggagggagatggattgaggtaggagagcttggggagctaggaattaaagaacacaccctcttccttaaccactggacagatccctgttcctccatattaggcatggtaattgacctatttaagctgatgaatgtatacttaatatttttgtctgaattttgtagatctttgcctatctagatgacaagatatttaaagtaaggttgagtcggacgcgtatgacacactccatttcagggaactgcagtcctacagtgatattggggtgtcagcaagctggcccctttcttcttgcgtctactcagggaatgctggaaacagatggaaccccatgagaatccttgtggtttcaggagatttgttgaggcttactgcgacttggggaagtgatctccttctttctctgttgggggtcaaaccctgggctctgtgcctccaacgcaagcaccctttcagcccagctacatgcccagcccacactgatctttccgatgcgcccttttatgagatgtgacacactgtgcttcatggaattactaacatttcacgaaactgggataatgatcaactcagagcgaggctggatgatgtcacattctccgctctcagaagagctaccttgggtacctagtcagaacacaggagtgtgggccaccccaaagtccttttaatgagatactcatatgggcctgaacttggggggactcagaagacacctgcaacaagaaacactatgaattgtttttttgttgttgtggtttgggttttgtataatcttctgtgccaggatttggaacacttgcctctgattcagctctctcccgacttttgacagctcgaccgtgatactttcgactggtttatctgcttaaccaaatttcttttagagtcgtgacggaaatctgtgactgaacagggcagcactgagctacatgagtctaaattttggagtcaagatgagtctcaggcaagagcttggctgctttggaaactgcatcctgtatcctatgcctcaagcatcttaatgtcagactgagcttgaatgaaactctacccctgtgagaagggcatgagatactgtctaactggtgaggtcattgtggagttcacattttaaaaacacatgtacatggactggatctatatacatggctcatctattaagagcgcttactgctatgctaagaatagttcctcgctccgataccagacagctcatgcaactgcttgtagtttgtagttctggtttctttgggtccaatgcccattggcctccacaggagccagaacatacgtgccacacagaaactcattcaagggtgtgtgagtacgggttgggagcatacatacaaacactcaagtaaacaaatgtcaaaccaaaaatgcatgtgtgtttatattcctcagtgttactgtagtgcaaagttgatgttagttttccaaatcttatcttgacagcagaaaatctgaattcagttctttgtatttttcatactgtggcacaaatggagatatatatgcttacttgtttcttaggatatatatatatatatatatatgtatgtatgtatgtatgtatgtatgtatgtatgtatgtgatgaaggagggaatgctgtgcccctgggagggaggaatgggggtaaggctccccccagtgcaaagccttttcttcacaaacctggctatgctctaccaaccagaaatctgttagactgacccattttccctgtccacagcctcagcatcgaacaccactttctgctgggttggtcctctgggttctagcgttggtagtgaattcaaagcaaaggctaggacagaaccattcacagacccctgagacaagaccccagcagccctgttctgaggactctccctggcttttcttttcaaagggaaaaacaaatccttaaaacgtactcagaggaagcattttctccgttggctagaagggactggggagttgctggcagcattgggctgtggtctccggagcccggagagctgctattcctcatgtgcacttggctttttatgcatggactgtcctccagctcctgggcaaatttctcactcccgggttttcaggagaaaggtttgtcatccgtcatcaccctcctcatccatcacagcagacggggaggcactgcctacgccggtgggtaggtgagggaaaaggttatacgtagttttcctttcttccaggtatagctctgtcccgccaacccccccccccttccccctgcctcccactttgctgagtgcataggcctgggcttaggggatcattctggtgtgtgtaggcagagggatgtgttttgctgatagccctagttggtcttgtcatcccgtggtgtggttgagtaagaggtaaacagccatttaattatttattgggtgcctggaggattttataggcggaaaagcttagggcagtggaagaaaaggggggccaagcctagagcttcttgtgtggctccctttttgatttgagattgacacattaacaaaaagattcatctttgaaaaattctttttgtgtatatttctgtatgtgcacatgtgtatgggtgcctgcagaagccaaaaaggggtcccggatcccctggagctgaaagtacaggcattagctgtctaatatgcgttctgggaactaagctgtggtccgcaggagcagcaggtactcttagaccccctcctccccctgccctgcccccctgccatcgctccagctcaggccgatgtgttcaactcatgccggcatgccaagtatcctggcacgggaatgacggttgaaccacctacagctccctccttgctgatcaatcccacccaaagtaggcactctgcctgcccactgttaggtcttgcttttctccatggcaggagtcaccagatggcacgtcattgtattgatcattattttcactgtgaagcacagcactgtggttattgatggctagaggctggggctaagagaaccttgaagccattgagagccttctcccgtatggtgggaagcaggcatgagagtggagatggtgtggagtttaggctcagcttacatgatagggagagagggaatgagacatgctcagcgagtacttactgccagacagacatcgcctcaacagtctgccgactcacattctcttaaaaagaaaagaaagaaaagaaaagaggaaaagaaaagaaaagacaaacatttctctttagcatgttttacttgggaggattaaagaagcatgggtggctgcttttttcaattgggccaaagaggctcaacctgcaagagagttttggtgaccacatgttacagccagggctgcctttcttctcttctctttctctgaaccttccagagaggccaggcccctatctcttaggggattaactccttgtggctcagggtccttgatcctcccccaccggcatcagtatctaaccctctctgcaaacaggatgttttctcggcctcttatcagatggcacggggagatgcgtggccaagatagaggtaacgattaactcatcctaaattcctttcacgagctgaggccccagaccgacttaaccactgagcagagggaggccttgacaggagcaaaccagattgggcccttttctctgaaggaggtgtagggggctggctgtggggtttcttactcctgcagcacccccacccacccctaccctcagccccgcccatgggttcccagctcagcaaatcaaagagaaattgacaagccattcttccctgagtgggggctaaataattgaatttgtgggttaaccactcaggtttctttatttttctcactccttgtgtcttcttagagtagcactaggactaaggggtccagtttgtgcttgtttctggagaggcaggaggaaagggtaggaatatatttaggcagctgtgtggtcactttctaaagagcagccttttggattgcagagtagtttagattttgttggtttcatcccagttgtgcctgtgtagaaaacttgagactaactctattctgtttgcagttaaatgtttcaactcgggaggctgacaagacagaatcggaacagggagtggtctagcagagttttacaagtagacaccaagcaagtgtgagcctgcagacacaggctgctaggctgggagggacccagatacctggggaagcatgtcagcccttatgtctggcccccttcatttgagcagttcttacaggttccaggccaggctgtgtctaccttgcttgccactccccaaagaaagaaagtagttcagagctgctggtccttggcactggactctgtgcagaccccttctatttagtgaccactggccagcacaccttttagttacgtctgaagccacagagaaaggcgtgtctcttatcatctggacttcagaccaatctaaccatgtggaatgacaagatgaagtccatctaggcaccagagagtttctcattgcaggttcccttgagatcaaggctggttacccctctgaagctgtacttcccgtctggtctgtagcctatttgcagagccaggtcctaattctaacccagatcttagccatctacccacacagaaaagaaacatttgcaaagaagttagacctcttggtgaatttggcacctgtaaggtgaacacagcggtgtgggtagaaagccatttgagtcaatcaacattagtttaatcttgttatctgaatgtatttcaggtttttataaacatgtgagctaaggctggccagtcagcccaaaactcttgagttaattctctggggttgaaaccttgggtggggctgtaccttgggtggaggcttttttttttttttttttaaagaggtgtgggatatctatgtaggtttcaattaaggcctagatctggcttgtctctgggtttcttgtttgtttataaactgtgcttcggtgaggtttttttccacttcccctcccttaccatctctcttccttctcttatcctaacagtctcaataacttctccaactgtcacccggggtgctgtaaaagaggcatttggacagcagttctgcagggattcttgtcttttctcagagttaacacaaagggattgggggtagccccatcaccaggggggagacggtttttcttcatttagcttttaattgctttctttcacttttatgtataaaagattgtccatttaattaactcaagaatgcaatttcaaaaccactaatgctttacacatgatagcttttaaaataaaagtagcattctaatattgcataatgtttttctctcctaacacatctccctgcgccaccctccaccccgcccgcctgtattaaccttttaacagtgcaggattttagaagaaaaggctgtttctcttcttgatggggggtatctctgattccactctgtcttcattaaaagaaaaagataactacattttgtattattattatttttctgtgcgtgcatgtgggtaggcgcacatgccatttgtcaccatgagggtccgaggatcaaaaacctcaggttgtcaggcttgacggcaggtgcctttgcctgctaagccatctcatcttggctggctctcctctttcctgatggaaaagagatcgggttccttcttatctctccttactcccttatcgctttaaaaaatgttgtgaacgtctcaagcccttggcattttttaaaaaccatttttgattaatgtttggtccttgtccttgctagtcttgcctgcggcctcttcctcttcctcctttccttcctcctctttctctttcctccttgtcttcctttttcttctccctgcctcctttcaaggcaagatcttactctaggtccagtctagcttggaactattatagacaagagcctgccaaccttccttccccgaatccacccccagcgtcccagtcctcggataacaggtgggtgccaccgtgcctacctcgtctaagatcttacagcttgctcatggagcccagcccagtccttctacctctgacctccctcaatggttgtgtcttacagccagacttgggaaggggcagggtgcagagggagtggaatcttggtcttcttgcagggatcccgggtgctgaggacaccaccttgctttgctttgcttttttaaaatgagagataagcccatggagtccctgacaggtcagtgacttaggccaagtcgtgctccccaacttccagggttcaggtgggaatcccatgacataagcgctagttggagcacctggggctcagcattccacttgcctgcagcagctgctgcttatttctgaggatgccaagaaaacaacattttaaacctaaggacacacgatgaaacctttcaaatccaggactgttgtaactcttgtcgtcttctgtccctctaggaggggacatccagttgttgctgtgggtgggatccaccttacaaggagccctgttctcctgtggtgacttttctctaaagtgcatggcattttccagccaaccagtgtggtcgccatgctgtattttctcaagaacgattgagcagctagtagacgtgactaaaccgttcctttctttcactgcggccggtatctggccagtgctttccctgtgctgggtgatacagatggccttgggagactcctgtgctttggatcttgtaccgtgatggcaaaaagggacccggaacaaatgttttctgacgaggatcgggactatggttgggtctgtgggggtagctagtgacagcctacccgtagagcatgtttttgttgctattcaggttgttgctgtcccctgcttatagagggcggattttcagattaacctggtatggattcgatgagagatttgagagtcgtggtttcccctgaagcctgtcctcctcagaatgagatctccatctcctctcacctttgtttttacagctcttgctgctttttccttagcaaacagtcactgtagaaaggggggaatgttgcttgttttctgtgagccaaaaggctggcgggaaccctgtgtcttggtcattcatcagttcccagctttaactcactgagctatttaaacttgggtgtgtaaggtagcagccccgaatgggctttttggtgccagctttagctctggaaccccaggttctgacagaggagacagagcaactgaatgtacaaaaccttccccgccattagaaagctgagtcttgtgccttgggaattagaatacaccatctccagcctcttaggtcctttttctttaaacaaacaaacaaacaaacaaacagcccagtgtgcacatgtgaaataacgtctctgactgctatggtggccacagcatctgaattttatggacttaatgaccctacacttaccagcaggtctgtgtattgctctctgcctcttgattttggagggagttcactttaatattatggtgaaacttggtgctcctcctgagatacatgagccattaggaaattgccagcggggtttgatgaagggtcatggaagaggtggctcctttcttccttagatctggagaggcggccacccagggcctccaaactatgggatcagacacgtggcttcattcaggtctccaggataggcttcagcatcctttgtgacagatgagaaacttcatttctactgatgagaagttcaaagtggttggatatttagcttacgctttgaagctggtagctagaattgagacttggggttttttgattgcttagtctatccgtgtaatgcatgcttgtattctcccttggtattgagatgggcagactagtccaaggcagggccacctttatcatcagaccgtagttcttctttccccgagttggtagcagtggggtgcagactagatacagcttgcttgccactaagtagcggcctcaggcatccttttttagagatctctgttaatccggattttaaactttcagaaacgttcagaatgagttggagttcattaagaacacattttaaggtagactcgcgcacggagagtaatagcaagaggaactgggggaaagagtgggacagacccagcttctcaagagtcgcacttccgtgatttagcagtagctgtgcatgcagcttggccctcttctgaagttacattgtttttaaggaccactcccctggcttttctgaatgagactaataggagggtctctgaggtacactggttaagattacggctgtcagggtgaaaccatcgtcacagagctgtgtgtgaaggagctaagacatgccttttactgtgagtgaagtccctagtcttgtttgtcatggtcccagagaacgatagcttacagctgggcatggataaagcccttacttgatccctgggcctgaagcacgtttattactatttcaaaatttgcatttggactatcactatataaaaataatactgggagctggagagatggcccagcagttgagaacacttgccgttcttgcagaggacagcagttcggttctcagcacctacattgggtagttcacaacggcctatgactccatctccaaggaatctggatctggcaccctcgggtggtgtacacacacacacacacacacacacacacacacaccacacacacacaccggttgggggagagctccaacacatatacataaatagataaaagtttagggagatggctcagtggttaatagcacttgctgctcttacagagaacccaagttcagtttccagcatctacatgatggctcacaactgtctgaaaccccaattccagagaatttgacatctcctggctttcaagggcactagatgcgctcatggtgcatatgcatatagatatacagacaaaacagtcacgcacataaaagtaaataggtatatccctaaaaataattaaaagaatgttcttttaggtaggcaaccttcacagaaaattgtgttaactgtgctcggattcttgactcttaactagaaagagtttttgatcagactctgagggggggcgttccttgcctttcagaagtccccgtatctctcgttctttgtatcccttttcagtttgcttcatcggtgggcctgtcccactacggctgcgggaagagggcagacatatcatgctaacccacgttcagcttaatttagctaatcctgcactttaagaggtggctcgggcaaaggaagtaggagagattgagcaccccctcatctttggcatgtcccttttcttctccagtaaggttccttggtcctgtcggtagctccccatctaagtgtgacaactatccaaggaacgttgttccttggctcacgggtttcttttgccctgtggaaaatggctttctagagtcgtggctggcttgtggtgaggtcagactgttgtgccttgaggtataacaccatcgacttagccaggtctttggttagggaggctatgtctgtctctttctctggcatttcagactctctgacccagcccgtccctcatgactagcgcgaccctcgtttggagacacttgggacttgagggtgatggaattgcccgaggtcagggttggggagcacagggacacccagatgtttgcatagtttctccattgccctggttaggaatgtatttcctcaggatgggtttcagccttgaagtgagccgaagataaacatggagactgtttcacatccgaatatcatgggggagagtttgagagaaaggcttaggagtgagcgggaaggtggggggagagaaggggcagagtaggggaagagggaagcccaaggagtggcttctgagacacagcagtccagggcctgtggcttccactgctttcagcagaaaataggcttcatagagatgactcggcgtgcattggactgattctctctgggagtggcacccaggcagtgtcatgtgttggggtaaaatatggaaatcctggtttagttggctgagtgattagaatctttagggaaactgatgagtcttttaaaaagcctgtgtgtgtgtgtgtgtgtgtgtgtgagagagagagagagagagagagagagagagagagagagagagagacagagagagagacagagagagagagagagagacagagagagagacagagagagacagacagagagagagagagacagagagaacatgtgcttgtcatacacaaatacttcagaaaagcacacactcagggacttccaagtccttcagctttatctcctcataagaaacacttttgaaaaaaatgatcatttgggggagatgggctctcagaaatcaggggcagagtaagtgtggggggattgtggagggtatgtgtgagtgctgtggaggtactttgggctctttgttggggacccccaatgccatagaaaaccagtctctcgttctggctggctttcttccgttttccttttcctctgggaagggcttatgcttcctccgtgattctgagctacagggtggtctagaaaatgttcacacgggacaacctacatgcacaccccaaaacatgaagggcttccatggttttcattccacctggatgtcatctcttcctagggactcagggagcactctggagctggcagagcccagggcagtagactttcagggcttttgtcagctcatatgaaagaatgtgtggagatgccaaggctgctgggttgatttcaccgacacagactctaagcaaagagatgagcatcagggagaggccgtgggcgtgggaaggggccgcagccttcctgtcttctcttctgataccttcagatcttgatgctccagtgtgccaaggagaggagagatgtaaacaattccaattgcctccaggatgcaacatctaatctaaacatgattaagctgatttgattttatagattggaatttctaagtgatagaaacggatgaggttaatgtgaaatatttacttaataaaaagcctcattacctggtgctgaagggtacagggatggagattctgggtaacgcgtttgatcttttggaaatgaagttagatgcaagttttcttggtaaaaactgaattctgtgatcttgtttttacacatgctgtgcttaaatattaacaccaattgagcaaattgccttttaactgcctttatttgctttcattaacagtataatttaaaagctcaagaatttgcatggaacctgttgtgcatgttgggggggggaaactattcataaattaattaattgtgagaacattatcttttaaggaaggtcaccagacactaggccagtctttgaaaagcagtgacgtgtgttttattagtttttggagacatcatgtacttttggcttagagggggaggagggaggggggaagaagggagagagggagggagaaagagatgtgggggggggacacttggctggatcaagaaaaattttaatgactgggcatgttttaagttaagttgactgaacctaattacactgtagttttagagagctaaaggcaatatcattggtatttaagcaccagtttgaaaatgaaagccaacctctataattggctgagttccctaaactctctatctctgtctcccctctcaaccctcttcctgtcctttcctcactcctagaccaatgggaagagggagaccctgccagcactgcccgtcatcatggcatggtcctccatcggggacagctcatgggactgttcttgcacgaaagcactgtaaatatcttgagatctgcccggccccctgacctcagttgcttccttctggacagatgttcctgtggttgagaaccttggccaaaacaaacgctatgaatgggatgaggagaccactgtgtcctagggaggccaggagccctgcctcaaggtcctctgggggttatttgacacatgctgttctgacacccctgtttggacaacacgtccctgtttcaccctcccttcacatgtggcctttctcctgtcttctcttggtgctgttggcggttttcctaattaacttaatctgtagtctaccttttctgggtctgcagatgccagcatgctgaatttatttattttgagtgtttttgttggctactgcggagacacatttttcctcccttcccccctcccccagagcccttagaccctctttgagaaagaatcccttgttttcatctgtcagatgtgttatttttaggggaaagagatgaaaatattttaaatagtatatattttaaaagccatataaaagttaaggaatacagggggggaaatgggtaaaacagacccgcctttctcccttctttccttcttcctttcctttcctttcctttcctttcctttcctttcnnnnnnnnnnnnnnnnnnnnnnnnnnnnnnnnnnnnnnnnnnnnnnnnnnnnnnnnnnnnnnnnngcacagcgctttggttaagcctaccttccttccttccttccttacttccttccttcctttcttccttctttcctttcttcctttcgttatgttctgtgttttttttgttttgttttgttttgttttgttttgttttgttttttaaagggaattgccatgtagtctaggctgaccctgagcccacagaagtccttctgcttaagttttcagagtgccaggattacaaacttgagtctccatgcctgctgtttaggtatgagtctgtcacctgcccagtgcataggaaagtattttcctggtctgttactttacagttttgattctgggtcattttatataacaatcttactcatttaacgcaaaaagtgtcacaatgaggtttgtagaatgggtaatataaagcccatgatgatcacagtttagaattagaatctgggaagaatatttggatgagaggaagagaaggatgaaaacaggaggagggagtgtgtgtatgtgtgtgtgaaagagagagcaagcatgtatctgaaccatgtgtgggtgagagagagagagagagagcatgtgtgcatgtggtgatatgatgtcaaaaggttgttttctcccataaaggctgtccttttttgaggacccctggctagaatttagcttgcatctgaagagtgtgggtttccatattctgagacccgttcttgagctgcaggtctagaaagccactccctcccagccttggggccttgctgaattgctgtctctaaaatgtttctgagggtacctcctgctttatgccaacaatacatctgtgaatctaaccctcctcctttgaaggctacttgccatctcttttctttgggctctccagctgtctctgccagccatatttcttacccagttggttctccactatctctatcagctagctgtaagtcactaagataccagtaagatcaactcatccatccttctctcctgctctctcttcttccgaagccaacactgcaggtattgggccctgagttaggtttagatattggcttggaaaccagctggagttgtgggaaggaggaaaggatgagtgccaagcgagagaggatgctagagtggtgagtgttgtgctcagtccctatgcttgaccccatcattacgatcattttacagaggtgagctcaccagttcctctcccatatctgcctgcactttgcctagagttcggtcatgtggacaggagagtcagtcttcactcttcgaggcttttgtttggtttggatcttgttcaggaacaaagaaacaataaaatacagacattctgcaaacgatccttctgggttatcttgtcactccgttttgcctgcccattttgtccttcctctgatcttggcacagttattcccagagttgactctatggcaagtgttaaggtagccatgttggctagatagatatccaatttgtcttgagctgaagcttgccttctgttcttctgtttgcatgtacatccatccattcactcatctagtcagtcattaacaaaacgtcacacaattaatagtagccagattaaacatgttttatacatgtttttacatgtatgtgtgtggatgtctatcatgtgtacgtatgagtgtgggagcacatggaccgtcacacgtgtggatgccatggtaggcaggcagcagtcagagggcagcctgtggaagtctagcatgagttctggggattgaatcaggtcatcaagttttggtgacaagcacctttgtccactgaggcatctgcttgttcctctttactttgcagatagagttttgtgtagtccaggatggcctcactatgtatccaaggctagccttgagttcttaattccttcttctacctcccaagagctgggactacagaggtgtgtgccaccatacccagccagctagtactatttctgtctccatagtatgtgttcagaaaataaatcaaattctattctttttacaagtaggtaaatttaaaattacctggctgtagtagtgtctctgatacctctttacctcaaggtaaggggcgatgcgtgagtgctttttgaaagacagaacagtggatgaagactggaagttgtattttcccagccaggagaataacaggttcaaagctggtgtgggctactgagtgagttctaagccagccttgtgtacttgtgaggcctgactctaaaccaaaaccacagaggtagaaatgttgttttggatcacagggcatgggagggaaaccatctgatcggctagagactgggagcttctgtctacacagataattgttcttgatttttaaattaaaaagttatttgttcaccaggcagtggtggtgcacgcctttaatctcagcacttgggaggcagaggcagcactctgagttcgaggccagcctgatctacagagtgagttccaggacagccaaagctatacagagaaaccctgtctcaaaacaaaacaaaaacaaacaaacaaacaaaaaacaaaaagccccccaaccccacaaaaaagttatttgtttatttatttatctatagatgtgacttcattcttagcccaggctggcttcaggactcggggctcatctgccttggttgcccaggtgctgggattccagacttgagacacccacacctagtttgagcttagtttctagacctgttggttgtctggttattttttttaatttcttgtaattcacttagatggtgggtcgtgccttggcagtggggttggctgtggctttgtggtgggtggaagcccgtgctgatggcagccacagagtttctgagtttgtttcagttcttatcggaatcccttccaggaacagaacatactttccactgcatggggcagaggttggagtggaagtcactgtgtccctggaatgttccaggccagagctctctttttctgtggatgtctgtgtgcagacaggacaggctctcagtgcccagaaacactgcatccaggggcagccatttcctttcgcatcccctttcttttgtttggtgggagggaggaaagcaggttgtgtgggaagaaagtttgtgtttttcacacccctttgattcctctcccccaccacctgaactctgaagcctttatctccatccctgggaaaagccctctactgaatggaaccattacttctatacacagaagggagggaagagagtagtcgggactgtgtgcaggtcctcaaacagttaaagtgtttggggtctgttgcctctctagaggtcaaaggtgagacagactttttgttggcggccacccccccccccttttaaaactccttttccttgttatctcaacttccaaatgtcagctttgatgtctattgttggaacttcaagaggactcttagcacatcggcaggtgttggttttagtgagcgggcggagagttccacattcttgggggcaaagagatggatcccagcacattcctaccccaagagcaaagctcccgttgccgcgcccctcccagggtgtacttgcagaagacctctggtcctgataggtctggatagtaggtggcactgggttccttcttgctctccaggcctgtccaaagggatctgtcttcaagctgtggagcagctgaagggaggtcgtctaacaaccacgtattaagatttcattaatcaaagacacttccatggctcttttacagaaacacaactactttggctgtcctctgctgacagcccgataatttgtctttccccgaagaggggaggggagagggacagggacagagaagcatacaggggtcctgctcacagaaaaggctccccatgccaattcctggcatgcacacgtgggttcatagttgagtttagcgatctgcactccagactcacagatacagtcaaagcagtgggcagccagccacatccccttgccccacggcccacatggtaagccatcactccaagtctaatactccatgcacaatagatgggctggctttgccttagtgcaaggaagtgcttacccctgaatcccagccccacgatatgctgatattgggatgaccatatagatgtgtgtgtgtgtgtgtgtgtgtgtgtgtgtgtgtgtgtaatggagggtcggggccaggggaggggtgatgggaacagtgggacctacaagctactgatttggttgtttttgttgttgttgtttgtttgtttgtttgttttttgagacagggtttctctgtatatccctggctgtcctggaactcactctgtagaccaggctggcctcgaactaaaaaatccacctgcctctgcctcccaagtgctgggattaaaggtgtgtgtcaccaccgcccggcgggagctactgatttgaaatgtacagtcttcccgttctactttacagagcggttcacatacatggaggcatctgaccttctgtaactcttggtcctggatatggctatatgtacatttaattacctcccagtgtctccagagtaggtgatagaacactgcatatgctgctgctgctcccaccatcacccccccctttaaggtctctgaaagagagagtagctttgaactcattttgttgaactcatcagatattttccaaatacccactagatacatttgactttgtcgagagacctgcaggtgagggaggtataagttgtttcttagctctttgggggctagaaccattacacaattagccaccataaaagatgcaatttagcgaagtcagtgggggctgcaggaaggacaagaccctttccatctggctgaagtgcccagcgagcatttatttagtcctgcctgtgtaccagtagagatctgaaaatctaaaaacttggttcttgtctccaagaacttaattatgtagcagagagagtagccatggaagtgtagaagagacacgggtggtataatccagggggaaatgaagaaagaatgatgtatggtggaggcagaatggaaatagcattgtgtgtttgaggaggggctgtggacaagtgtactgggatgatacctaagcagggttctcaaggacagatgggagaaactgatcacccaggagggaggacgttctagaagagacagcatgtgcaaaggccctgagggggacagagaactgaactctggtgtgttcactgtggctccagaggtggagtgaggcagagagcaggggatggaggtgatgctgagcttgcctggacgtctttcgtgcccagcagagaggcttgcactttcctttatatgtttggagaaggcgttgaaacagttttatcaaggaagtgaaataggagaaagagtgtcctagttgggacggctctgagagctgacttgaggatgaggatgtggggccataggggcatcgctgggaagccggttgagcagttcgggtgagccaaatgatggcagtggcaaaggagatagggagaggacaatggagaatgggtcagagggttggcaggtacagggaggtcgtagacagtggacagagagacttagaagctgtttgcttgtaagtctgtagggagataaggttgtagatgttctgggtaggaagacactgggacatggtatttaaggacatcttagaaaaagcgtacatgagggcctgtatacttacaacaggtcttgagggagaggtgtgtgtgtgtgtgtgtgtgtgtgtgtgtgtgtgtgtgtgtgtgtctgtgtgtggtatgtctttctgtctctgtgtgtgtgttgtgtctattcgtatgtgggtggtgtgtgtttttatggtacggatcttttagtggggtatgtatctgtgtgtggcatgtgtgtctgtctctgtgtgtggtgtgtatgtgtgtttgtctctgtatgtgtagtctctgtgtgtgtgtgtgtatgtgtttgtctctgtatgtgtggtctctgtgtgtgtgtgtttgtctgtctctctctgtgtctctgtctgtctgtctgtctgtctctgtctctctctgtctgtctatctgtctctctctttctctctctctcagttgctcttccacttattctctcactgaatttggagcttcccagttcagcccagctgccactactggatttccgtagagggcccctacacccgactttttacatagggactcccagtctgaattcctttctcaagcatacacgacaaacacttttaccaactgatccatctccacagcttcaggaaagatattttgactagaagaagacgtcagcctacaaatccagttgtattcactgacttcagatgatattttcaagtgaatacgaacagaagtatcttaattccacagcagaaaatggtcctttggagttgcttgaatcatgagaagtgttttcatcaaagcctttattcatgggtgtgctgacatctggggagcggagatagatgttttcctgaggtccagactcctgagccatgagctcgtccctcgatcctaattaatcctttgtagttagtgactgatgaaatcacggctctatgaaattttaatcctcgctgtgtgtgcgcaaactgactttatcacaggaccccaggtgtgtgtcagaaatgagtagtggaatccgctgcatatttgattgccttgtggaatccactggatctagagaaaacagggtggagcacttgaaggttgttttatttctgtggccttgcctaacagtcaaatgtgatcatggccactgagagtgagcagttagctataatagcttacccgaggaaaccgtgagggcagggagacagggtggctggaacctgggccttggcatctgatgagtcttcctctcccctttgctgggaggcaaggtgggagaatgagcggagtgcgctcctgatacaaggagggggtgtggctctgtgatgtgacagtctgctctggcttccccactacctcaaaatggtgagctctgcactggaatagcaagaatgagggctgtacacgctgctcggagggtagctggggtttggatgcatagttcaggtcggcctttgtgacatagcatttaggggcagttgtatagctgggcatggttatgttcccaggggttacactccatcactaccatccccctgtggcaactctggaattacctgttggatttctcaccaaggacctctaagtcggcatgtgctctaccagccctgtcctttcaagagaactgacaggcggatgcttttttgtgtagtgtgggattcccgaagtgtagagttggaagccttggtgacagactcatggttcctctgcgactagtggaaagtgtctgttttagggggtttgcagtgaagggaggtgagtagctgctctcgagcaccatatatgacagtccccgtacaagggctttaaaaaaaaccagattccgagatctgaatacaggtgctagacagaagctcaggatggttatgtgcctttcttggtgttacacagctaggaagcagtggggctggggtctagattcaggggtcctcactctttccactgctatggaaggaatattcatgctctcctggcctctccatgggagggcagttatcacagctaggctttgccactgcaggcagacctttctttgcaggaggatttctcggaagcagattgcagttttctttctttttttgagacagggtttctctgtgtagccctggctgtcctggaactcactttttagagcaggctggcctcgagctcagaaatctgcctgcctctgcctccggagtgctgggattaaaggcgtgagccaccacggcccggctcagacaaacgggctcagattgcagttttctaacaaacgggaaggacagagtctgctgaggagggctgagcctggaggagggtgctctaggtggtctctcaggaccttctcagcagagaactctgtaaggggagaagtgaaccattctatctgatcttgtaaaagtggttgcctggggctagtgagcatctgctgacactttccttgcaaggtttcttggaggtcattagagccacaccaggcctctctctagagtgtatacaggctcctaaggcagagccagtggtccagacagggagggaccaggaacagagccttaggcagatggggagggacagagccttagtcatgaagctgatcgggtacaagaccagcttagaccagatttttctagctctccctcacccctttcccatctcccctctactttctcccacactgtaaagccattcatcaacttgacttcaccacattctgtatcacatccttggaggtcacagcttcttacttagtaaccctccagtgcagcctccgatacaggagagtttctcttctaactcatcccaagcactttgggtttctccccatgttgccggctttttggttcttctccatgccttctcttcattcctttggatgctttcttttaaatctggtcaagctgtggggcagcagtgtcatattcagagttggaccaggatctgttgaggctctgaagggcttttggtaagcattgtagtctgtgatggttctctctcaggtgatgtggtttaagtgagacaggagaggtgttgtaaaaggtccctgtgcccttttcagccttctgttcaccttaggactctctgtccctctcctaggaagccacatagcattactctttccatggatattgcctccattggcaggcatagttgggcaaccaagctccatagttgaatgttttgaaagaaaacaggagcacctgtctgggatgcccagttacagtcctgtgaaatacccctggctcgtgttgagagaaactacagaaccacatggaatctttgggtaccgaaagttctccacatttcatggtcctgggaagggggttgttcagcagatgtctttcttaggtggcatctgttgactgatttttccagggcagtgaacattcttgacttgtaggggtctgctgattgccatgttgcaaatactcttgatatagctaacttaaagctgccgattgtgggcttgctaaggcagtctagagttatgagtccagttttgtaggtcggagcctctgactgccaccatcaaagccctgacaaccctagatgggcaccaaagtggagctccagcccttgctggcccactaggaagatagggtgttacctggggaaggtcacttttcctcctaaccaaaccacaaattcaaacctgtatcctttgcctttgcctttgctttttctctttctggtccttggctctggtgagcaccatggaaatcaacaaaaaccactgctcattgctgacagtagttggttggttatatctgtccacagtttgatttgctaatcatagccgtaaccctagagatgaggagtgttccatttctgttttatagatgaggaaaccgaggcacaggctagagaagccattccttcacagttggacagtcttgatgtcagagtgaagctttgaagtcagcagtggctgatcttcacatcccaagccatccccagtgccttccattgcggcattgcacagacttgtacgcatttcgaccttcctcccaagacaggtgcttctagcatgacctttgcttgtgttgggagctcttcatttcggactgtcacatggattctttgaggtgtgaagtgtcatgactcccatttagggcaagtttggctccggggttcgggctctcctctagcatggttcttaagccccgagtccacagatttcacagagactgaaatggctgcttccttcatagacactgggtttgcctgttccaaaaatggtgatttctatagcaaccatttattctagcagatgtgtgcctggtagggttggcaagaagggtgggatcaaaaatggaaacggccttttattcttcacttcctgagcgcgtgccctgtatatgaggcaaacagaaggagaaacatggcatccttttagcctgtgtaacatatagggcccagcacaagaggatctgttgcttaaagctggtttctgtctgtagcttaagctgggctgtgcttggtggtggaactttctttggcaggcgttcacgttggttccaattcagtgaacgtctgtcacttcagtttctgcaaatgtagacatttatcatgaggtggttaataaatgcggagggcacagtagctaaagatcgctaagtctaccatagtgtgtactagccaggctctctggatgtaggttgtaggttgaattctgtgcatacatttgtctagctgaagccaaataaaagaatctgttgtcataaaacaagagtttcttggagcccaggggcaagaaaacagttctcccttgaaaggtgagagaacagaattaccatctagctgttggaaacgttctttctagtcctgctcagtttatgcatcctgcttaatttttatagttttttgcagagtgaatccaagaatggccttcccatgacttccaggtgcacaggtgacaaggttaggctcagctgtccatgttttctagaatctcagactctagagaacattctgtcctctgcagctgggctaagtgtccacacttggccagttgctcagtgaggctttgtagtgaggaccatgggtgtggtctgctcagactctcacaagagagctgcatggcatgacttatccaagagaaatgtacttgcaacccgttttagtggttggatttctgaggtcagagtgctgaaggcttcctacagggtgttccttctggcttgtcttccctgtgtcctcaatggatggggaaagagttaagatctctctctctctctctctctctctctctctctctctctctctctgagatcgacacttgaattcttacttatctcactaccatctttccctatcatacgctgaccccgcgccttccctctagcttttgttctcttcccgtcacccggcttctgtctttcccaactctcgcctgctctcttgctgttcgcggctctttcgtccctctagattgattcaccctccctggtcctttcatttctcctccccgatccggttctgttcgcacctacaccttctccttccccttcctccttgggtatactgagtacgaacctcgccctggtcaatctcccactcgattcactgctccctttttctttctcccactgcgaatctctcgttccgtcacccgtctatcctagccgtttcttccgcctctcctcacccccatcgcgtacctgatgttcccccctcctcgccatcttctcccctttatgtctctatcctccccgacccctcttcaaccgcgtagcgaatctcccctctgcccccacactcctcccgacgtcctccgcctctttgccctctggcggacgactacgctctggggtcccacccttgccccctccgtgacctccctttctctatccagtaccattcttgtctatcctacaaatctgccttactnnnnnnnnnnnnnnnnnnnnccctccctccctccctccctccctccctccctctctctctctctctctctctctctctctctctctctcttgttttttcagacagggtttctctgtgtagccctagctgtcctgtcccggaactcactctatagaccaggctggcctcgaactcagaaatccacctgcctctgcttcccaagtgctgagattaaagtcatgagccaccactgcctggcttcttttggtctcttgagatctcctcctcctcttctttttgagatatgatttctgtatgttgtctgagactgagattatagtcatatgatcatactacaataccaggctgggaagggggacgtagggttggagggtgtctctttttataaggacactaatgttatgacctttgtttaacccaattgcttccttgtaggtaagtcgcatcctgtggtatttgaggttaggctttcagtatactaattttaaggatatacagcttagttcacagcagttctatagtttaaaatggctgctaggatcctcccttgccttttgtggattggagggggtttacagtgtcccctaaaaggagtctaccacaaatagaaaggatgaatgtgctacaagaaaatcctggatgccagattggagtctcaactatcttctttctcccctccttcctccccccacctctcttggatagtctgtagccctcactagcctgatactcactgtgtagtgtagctaggtttgcacttgcaacaaacctcctgcctcagccccctaagtgctaggattatagttatgggtccctgtgcctggcttcaacctcctcaattgcactgcatttgtagctaatagctatgttgtgtgtgcacacatatacatatatatgtacatatacatacatcaaacatgtacccacatgcatgtatgtacacatgtctacatatctatttgtgtgtgtgtgtgtatatatatgtgtgtgtgtatatatatatgtgtatatatatgtatatatatatatgtatatatatatatatatatacacatttacagaaatatataactgtttagaaagagattgtttacagatgcctttccaacccctgttccatactgaaaccagctgacctgtttgttttcctataaagtttgaaattgagtaaagtacatattttttactatcacagcccccatcattctcacagccccctccatcattcttgttgagcaacacctgaatttgcaattctgcagtcataagttctgtgtgatagaagattccccacaatggccttaagataaggtttttaatgaaatgagagaaagggggacagagagatggggggaggaaggaggaagggaggaactagggaccccagactcttgtcaccactagctaagtgggaatatgggcaccgggtcgttccagggagcctcctgtggcatacattcctgtgccagtggattacgtgctgtgacagagaccagatgatgaatatatttttaaacttggaagccatgaaccacttattatttctgaattaggaatcaaaacatatgaataatctcaacaggggatcagcagatgcagtctgtccttggggtcgctttgctctggggagatgctcggggtgatggggaaccaagtccagcccatccttcttgtgacgtgtaggacacggtgtggtgttagctcaattaaccaggctctgtgcgcgtgatgcaaggttgtactacaaccgtgacatcttggggtcagagcaacacttggaaacaaggagccatctttatttctgtaagttgttcgtgtcaccaggtatcttgagaagaatataggatctggtggctgtggtgactgaaatggctgtggcttgaaatggtgtttttagatgtatcacacacatctcttacccggtctttccttttgcctccctctgcacctctacccccatgcccctcccaaacaagatctagaacggaggtattctggaattccacccttgttaaactctaggatcaagggcagttatttaggaaggagatggaggaagaagaaaacttcccaggtaaccctttggccctccctgtagctgacagagccttcaccgttcaggggcagacagaccagcgcctctcctaagaggccttgaaacctgagcttcaccagccaggagacagctaagccaagcccagctaatgacagtctccctgttcatatgatgactgtgcagagagcacctgttccagcctctcgcccattcttcataaccaagtacacagtgcttgctacacaaggcaacacataggaggctcatcggtggcaggagagccaatgtcggcttggcttgctctctgaagggagagagccaagggtgggtactaactgggtttgttttctttcttctgggcaaacctcagactcttcattttctctatctacctgttttccaacagggtttcaaaggacaacagtggtagcatccattttgagaagcaatgcagcatgcttagagagctaatgatcgcctctgcctttctccatcccaacccattttgtttttatgaaattgtttcagaattacagaagagtttcaggaaaataaaaatacagcatgcctgtccccctgcccctggccattccctctgccaatgtgggacatggcagtactgagccggtctgctcgttgactcctttcttggtcgtacatagccacaagacagccctttccagtgggagggaagctgtgttgtatgttcccaccttccgtgctacggagcttgtgctttctctttggggcagagcctgggttagtgggagagccaagggtgtgctgactgtaggggtggtctccatggttcagaattgtcgagttggagaactaggactccagagagaaaaatcacctacagtggcatctggttttccaactcttgtaacagatgcattgttattttacaaggggagggtccaagagccctggaaatcctggcctctgtccttcacctgctaagtacgtgctcctagatgggtggcttggaacaagatacacatggagactgccctgttgaggatcctgccagctctgaacctctcagtgcagtctagtgcctttacctaggaatggctacagcttttatctaattacctctgcctgatctggtcttaaagtgaagtgaatctagtgctccgtattgaaatatcttcagagggaaccacaaagcctcgttgtggtggtgcaggtcttcaatcccagcactgggaggcggaggcaggaaagatccttttgtttgtttgtttatttggttggttgctttttcgagacatgatctctctatgtagttggctgtcctagaactcaactctgtagaccaagctgaccttgaactcagaaatctgcctgcctctgcctcccaagtgctgggattaaagttatgtgccaccactgcctggctaggatcttttgagttgaagacttgcctgatttgcagagtgagttccagaacagccggggctacaagccctgtctttaaaaaatacaaaacaccaaaaatactttcctgttgctcccaccaccgccgtcagagagcagcagccacagccttgagctaactcgtggctgtgggcttcagtaagagccataagaagaactctagtaagctgagacccaaccgggacagcagctaccttaccatagcatgtcaagttcgtgggggacatgatccgggaagtgctggtaactggtacaccaaggagctactcaaggtgtccagggacaagcgtgtgctcaggtccatccagaagaggatgggcacacacatccatgccgacaggaagcagaaggaaataagcaatgctttggcagctatgaggacgtcgctgccaagaacaactgatggccctgccccctcctcagtaaacatgtatgctgcttggaggtggagggtcagggggaggcaaccacaaaacatgagtttgcgaacctccttctcttggtttccttgtgcatggattggttccaggaagtgtggtggtaaagggctgagctggcgtgaagtggagtgcagaagccttagggagggagccgagtgtagctgtggggtgtggcccggctccatcttcatctgggggtgaggtcaggcacccgggatgctgtgatagtggctaggtgagagcctggctgatcggtcagacatgacagcttagagggacattctgcaagggaggcccgttggtccttaagtacatttaggggtccaaggcaggtgactgtggtctgaagacccagtaagcaaacaaaagagttctccgcctttccagtctcactcctggtagcagcattgtccttccctaagagcatccattcccagtggtttgaggtacagcatcctcaccttgtctttcccagcaggagaagtctcttaaggccaggaccctgtcttttttcctttctcaagtggaagccagggaaaagtggcccctcagccctgtcttgtgacccaaggttagcatcctccaggtcctccttctgcagaggactagggctgctcccttgtgtcacagagcccggtgccagtggtgcatctccctctcaggatgaaggcaggggtggtagatgagtgttcaaatccctgcatgagctcactgttctgtgtggcttctcttacagaagcctggtttgcacccctcccccttcacagttgctcacaggtgaaaaccaggatgacctgccgagccactggcatcagaatcccatggggtccatgtgtaaaactctcggcctgcttcgatggactgtaatccaaatccctgggggtggaagcatagctgtattgaataagcttcctagataattgttacgtgaagttagaggaccactttttgtccctgtttgatgtctacatactcacacaaacagaaacatacacacacctataagatggttgcgtttcgactgaagatgtagcatgcacacatacatgcaggcacatacacacttttgctatctgggatgctttgttgtccaggtgtttgaaggtcagtggagggtggtactggaggctgggcttctgactagaaatgccaagagccagaggagggaaaggttggaagagggtatcagaataaggtttcaatagggctatttgggtggtagagggctcagggatggactcactctgacattgatgaggtttgaagcctccacctatttggccagctcacagagctctggctctctcggcaggagttgtgtgtcctttaacagtcaagaagtgagactttgtggaaagttacagtgctactgttgtgtctgagagaatgcggataagcataggtgacttagagtagcgttgcagactgttgtagtgtttctgtgaggtgagcatgcagtcactcttgattgcccacacgacaggctctcgaatcaccacagagaaaccactgtgcgtgcctgtctgagagtttctagtttaggttcattgagatggaagagccaccctcattgagggcagtcccatgcatggattttatggtctgagcaaaagggaaaagctgagcagaacccaagcgttcatctctctctgcttcctgactgtggatgcagtttggccagctacttcatactcctgcggccgcggcttccttgccacgatggactgcaccctcagattgggagccagaataaactcttcattaagatgcttttgttaggtcatttgctgtagcaaggagaatagtttctacagtggggtctgggcctgagaggaggaaagtcttccgccctccacccagctactctcccccacccacccccaccccttgtgggtgagttcatgaagacctggcagtcagtgggaatggggcttcccagctttacctggttttagtcaggtttacagggttttagtctttcttgctcagttaggtaactgggaaatccttttcttgggatttgagtctccttttgtcattgtctcggcagactgctccagtaagacatgagaaactgtgagaagtgccttagagagcttaggatctctagatggaggtgatggggaggggcagaccctgagagataagcgctagcttgtcctgcgccctttcccctcctgactgagcatctgggagcacctcttcaggaggacctttcccagtctgaggcagagggatgggtcacttggcctgtggacagctttaccagtggctgccaccaagtcactcctgcactggccaggtaaaaggcgaagggattggaccatggttctgcagagcaggcgtcatccatgtgggcacagtggtacaggggggtgacttgtgtcctgcagcccaggctgggtttaagtaagtgcacatgtgtgcctcatgcctgcagaggtcagaagagggtcagatcatctagaacaagccatcatgtgggtgctggaaaatcagccccgatcctctgcaagatcagcaagtgctcttaaccactgagccatctccctagccccattgccgtatttgtaaacgaagttcagactctcagagacaagactgtgttgagtcttgattctggcgatggagagcctgggctagtgtgagagtctaggttactttaaaatggatgtgaggtagtctagttagctcacctttctctgaagtgcccatgtgcctgtaagctgctcacctttccatgtgccatgccattagcagtttgtagatttctcttcctggggcactggagaagcctggggtagaggtagggagcagactgaaaatggggaacaaatagtgtctacagactttacagagtcaagaagtggcagtaggaagctggcctcagtgtgggagcaggtcaggtctctgcaggtatttagatgtctggaaccttggtgacataggacatgccttgattgtagctgtggtctagatgggcagtgctcagggacccgggcccactcagtccccagtatggtttgtcctttacttcctgtagctgttttcctttcattttcttcatttggaaaataatcagcaaaatccttatttccataagcatttttttcctggctgtaaaaagctgaatcctaaacccattattatagctgttcatgctattttaatctactctgtttagaggtgagagggtagcagcgaatctacaattactgcgtacatttgatccatggcacagccaccggagccgggggagaaccctcccgagtagggtggtaccacgcgtggcaaatcactttcaaatttactaaaaatatgcccctctgcagccatgtagatatcataattttcctccccaagtcttcttgaaatctccgtttgcttcccacccagcgctggctcatctgcctgctcgctttcattcttttccttggccttcgtgcccacacactgccccccatgccgtgtactgtccgtgcccccctcctcattttcatctcctgctcagaaatgtttcctatcctactacccagcacagtagtggaaaccatttttggtttgccgcggtcaagaaggagaatacttagaattttaaatctcctagctatttcacatttaaacaagctggcgagctggagtggtgccgtgcctcctacatacagtaattgtcacatccctaggctccccctttctatctctgttcctacttcattcatttttctatttgcagccagtgcagaatatgggccgctccccctcgcttgctcctgcatcccgctttccatccagtgaccttggcttccttgagtgccgcactgtaaatgaaatgtggcattgccacatggatcttgataaaatatatcagtgcatgaattgattttcatattgatttccttgggccagcaaggtgtgtgtctgtggaagccaagcgtcttgtaatgaaggtcctagaaagtggtccagatgcctagggaggggcgggctttgctttctttttcacctaggaaaactttgtgcttgttagctcaggagagaggctcttgtgctctctgggttcactctttgagcatatagcctcaccgaagagagagaaacattcatctctctgctctgtggcctgggctgtgcggggctatgatctcagtgtgtccagctgctttgttgctagagagaccaaggaaaccatcagggtagctactgaaggccatgtgcacccagcagtccggagggtctgggttggggaggtgtgtgtgcatcctccccctggtcatttcttctttcctttctcagccaagttgagatgtggcacttgtgaatttaggactgatgctctgccctaaagggatgtgtataattcatgatgtgtcaacactgatgtctgagtgtgcattggattgtgctcttgtagctccaagcacacacacaggcctgtgtgtggtggagtctacaggatgtgactgtgacatggtctcctgccttacagtgacatttattagtaagctacggacaaccgcaagaacagcgtcaagacatgattaaagctttcctttttccctcctctgtcaccgtcttcccagtgccttctctcaactacttctgtgtagacgctgccctcagcaatagttcagctgatagttgataaaattaagtgagcatagcttcacgtgatcccatgtgcctgtctgtgcttatgtagggagagtaaggcagttggaattgctgtggtcactcattgtgttttctagataactagaaagacccaactagaaaacctttctagttgtaagctgtgctgagatacactggcagcatggcatagtgtatctatctatctcctgctctggtaaatgccaggaagagaagtcactgagtgctttggtgtcccatgatctcattgcgctcgggaactagtatcttggttcccagttataatggcatcggaaagcatagagctggcttgggttaatatagtcagtagttttcagccagggacaaattcatgctcacgggtgcagttagtaaaatccggagacagttttggttgccacaatgtatgtaggagagttgctgctggtatatactgggcagagctgggaatattcctcaccttggtttctggtttctgcatgcctttccctcacctgctataaacacacacttgctctaaaatggcagccgtgctgggttggaacatccttgccccaagacagggctttgagtatattttgttgttgtttttgctgaaaagtttgtattgaatcttaaatgtaaaaatcacttcccccatgggcctagattttcttgagtcaggtgttggaaatgatctgacataatggaggtttctcattcactggcagttattgttccagagaacaagcatggaagcctgccagcatgcagatcagcaggactgtccccagatggcccacccagtgaatgcccaaattcattgactcatgtatggttagtcaaagccacaaggatcacatgagcttaaagttggactttgagagcccatggtctcacaaggggacatggttcacccttgttttctttgcaactgaaactacattttcagaaacttctgatagaactttcctgagatgcctgccaggcccacgggactgactgcgcatcagaggcagtttggccgtgggtgtcaaacatcttcaatgtatgtagacctgggcgttgcttcttggctggcccaaggtgagtccttggcagaatgctttggtcttggtgagacaggtgtgtgtgtgtgtgtcagccaaggcagatattttgtgtgctttgattgttgaacaacattattggaagccaatgactgtcatatgatcagcttatttaggcagaatctcatcaggaagggcaggggttagtgaataggaaggacctcctttgttaaagtaacgggaaagctaatcccaaacgaagctcccgcgttgaatgttctagaactatcgtgtattggtttcaccttcacctctgccctctctcatgctggaaaagagaagttaaatggaattggtgtgtttgtctgtgcttctggcaaacacaggtcagatctttaagagatggagtgccctggttttgattgggtgtgccagctgcctgtcatgacgacctctgacagggcccccattgtttcatacacactgaaaagggaaagaaaatgctccctccctaccccccgccctggaagatcagttttccaaacctttttgaaagggcagtgccacacttccttcggaagtaagttcatcttccatgctatattttctcatcttgcctttgctgtctgccagcaggaggaagggggagagagggcttgttggtggactctgggtgagactctggaaagactctgcagtcttctggctatgcaactttgtgcaaatttctaacttgcgctgagccttataggaaccatagcatactctcttgagcctctgcatgtttgctttcttactttcccagaactgcgcatgtgtcaggcgctctggattgttatgtggggttttgcgtatatcctaagcatggttcctcaaagacgtaagagcttctcttccttctctggggtcacctgacttgttgttaggtagcttaatcgaactggaggcgtacctctcccttggtactctgtagacccttgggtggatgcatctcctgtcctgtctcttgatagaagagtatttatagctgggtacaagtacagtcagaagattcttataaaacgctgttgttactgcagcaccaagttagaaatgcttgaggtttcggcttcttggctcttccatgcggccatgaatattttatgggaaaggaaatacttagtgtctgactctttttatagtgcagctactcacgggctgggaaccttccagatcttgccaaaatcaaaaatcactgcccgtccatccgtccctctactttcttttcagagcccaccagagccccaccgtcactgaggtgtcgagctctcttggtgaatgaccccatttgtaaaactcgagaggtgcagtttccagtcctaataactatcctaagctggaggggaggggtgagttaccactcagttctacccagtccttctggcctggggttgctggttagtacctggttggcatccacatggaacataacacagactgcttctaggtgcccatcagcactttcagccagagtcttctctgctcagggagaagtgtttcggaatccctagagtccactctgatcttggaacataaagatcacagttaatctggatcaggtgctatccctctacagtcttagcaattgggaggctgaggcaagaagatctcaagtttcagacaatctcaagaaacaaaacaaaacaaaacaaaacaaaacacagcatcctacagcagtaaagtctggcaggcctcaagaggcttctcctttcacaggtaaaggtgggtgagatacctttcccaggacttctttttcttcccttcagtgacccacgtgtaatgcaggaaagtgaggcctttgtggtttcagctgtagctagcttggtggggactcggtgaagaggaagaaaggccttctggcctctgaaacatggtgggagttcttggttggcatcagtggagccctccaggagtacgtgctcatctggcttggacgcacagtctgtagatgcctgctatgactacagttaccttagacctggtgacaggtcagatcacagtgtctaagagcactcttactttgggggaactagcccagtgtgacttctcagagggggacagagacgcaactgtctgtctctcgcaggtgagctaagtggcctatatttttaccagactccccagactcccaagcatcaagcatggcttctgatatactcaggggtacaactggtttctcgtgtgccagatgaagacatacatctcttaaagatgtatttcatttttgattatgtgttggagccccccctggagctacagctacaggtggtttgagctgcctgtcgtggatgctgggaactgtattccagcctgctagatgagcattatacacttataatcacagagccatcccttcagcttcccaggacagattctcttaccaagagcaagtcggaaataagtgtttgatatagtctgaatctcagctttacccttgcctgctgggctctgggagctcaggcctgttctacatctgcctcctggactgcccttggcgttctccttggcttttgatcgggtattgttttgcataccctttgtggttacgtcactatgaagcagagctgtctctccttggggaagctctgtaccttccccaccccttgtcttggtcttcagactcaacagtagcaaaaggcatggtagggaatagaaggttctggcatccttgctcctgggctcttgtgaggaagagccttccagatggaagtgccttgggaaagaaaaggaagtgaaaagagatgaagaggctacccaaggctctttgcacatctcaccctccctgggcaggaacttggtggatgtattggttgggtacacagaagtgatacaaagaggatttcgagatggcaattacgtatttatatgatgagacgggaggattttcaggcttctaaatccttgcagcttgcttgtggagagaggttggaggcttccaacaaggccagtgcctttgagttagactgcatgtgtctcttgggagggagatacacatgcctgctcactctgttactttatttcagcgagcttggctgtgtccctctccatggtcagagagagcagggtgggttctgtggagcagacagtaagcaatggcattggaggacagtgttgtgagtcttgctgaggtttccctcctggcctcagagaacaggccagaattgggggtgaagcactgcgtggcagtctgagcacatcatcttgttctggtgatgaagtatagaccgtgttcttctctgcactggtgaggaccacttaggcaaacacagtagttcttcatgaagtgggctcatgaagaaggtagcaagcaaggtatgctgtgttgagtacaaaatgaggaacctgaaggggccaggataggaggatgcacggcagctgttggctggcgtcactctttatgcctgtgcccctaagttggtggtgtggggaaggcaggaggtggctcttagggccaggtatggattataactgtgggggtgggggacagactgtgtgactcaggggtgggtagcatttgctatttcagtcttggtagactttagaagtttgcagcagaggccaaggaaggatgtaagaactgaaagaaggagggatagaggtttggaggtgggtgtgaccccagatggcaataatcttacatatagaaaacaggctattttttgcataggttgcttggagcttccacgcaaagctgctggtattcttcctgcagccttaagcctcggaactccctcttcttgtcacctcacctctcccttgttcctgttgggtatataatgtcttgtgttccctacttgattatagactcttggcagacatagcccagtatgacatgttcctttgaaagtccttcactgcgattggccccatgccttgcgttattagacggcttgaatggccagaaagaccactgctcattcctttcttctcaggggagcggctcatgtatactcccagttttcttgcctgtcccaggccagtttcagtctcaaaaagaggcagaggcccgcctcttcctcttctcagagtgattctgtaaagatttataacatgtacatcaagaaaccgtgcgtggtgagcgtgtagagatggagcagttgctgctacgtggaagatcatactccaacaccagtggagaaacttggaggcctacacttaaaaaagggaaagaaaagtggtgtgtgtgtgtgtgtgtgtgtgtgcacaggcatgtttgttctcacacaaatatgcaggtacctgatgaagccagaaggggatgtcagagtcctctggaattggagttaaaggtcgtttcgagccgcctgatgcgggtattgggaatgaaccccagacctctagaagagcagtaagcactcttagccattgacctgtctctccagcctgccggctgccacttttgattcatagtcttttgctactgactggtcaaagtaactctccagttctaaagaagaaacagggccagcgtccaattccctggcgtttcttggtttcctctttcctactggttattgctactgtacttcctgcctgcctgctcctttgtgacgatggatagtttgtccaggtgcctgtttgggttttctttggagatgggaaaacctcagtttactataaaacttcctaacgcttctctaaatggaacgtgcttgcttcgtgggcccctccacgtttcaaatattaaacagctatctcctggagacttctcctcccctccccccaccccacccctcagaaagctcaaccagatggtgagaggtggtgtgtggaggtgggtgggggctgctgacttgaccacatgtgtgtggtaagggttctagggaggatacccatttctgtaatatatgtatgtgtgtgtgtgtgtgtgtgtgtgtgtgtgtgtgtgtgtgtgtgtacatatatatatatatatgtatgtatgtataaaacttactaggttccagctacagaacaagactgagagtgttggcaagtggccaagcacagtaactggcaggaagggcctgtcacttcaatattctcgaaagaaatccagttttccatgaatgggaggctgtggaggaggttggagaagcaaatgcctggcttgtctccaaggccagatgttctgtagtgccatatgtcatgacgggaaggctagcattggagcttacagagcacgtcaggcccatgctcttaggctaccacagcccttctcgagcttgctcttcctgctttcctggcccgcctctgtggtcggaacccttccgagccactcagatctgctgcagttggcgagtgtccagggtgctgaccttagccgggactgattgctatgctgctgggcagtgcctgctggatccttgatatctgctcagcccagtcttgagaccacttcaaaggaggcctttgccaattttatttttcttcctcagcctgggttttgtggtcattaagatgcggcatccgaattgcgtgactcttgttttcaatggtgtcttcacttcttctctcagtgtctgttttcccctctttctttccatcttccctccctctctccctcccttcctcccttctgtaggtgatgtgtgtgtgggagtgtaggtggaggcccaaagttgccatcagaagtcttcctcggtcactctttacctcatattttgaggcagagtctcacactcttcagctagtggatgaccagcgagcctccgaaacctcctgtcttcagactttgtaggttctggagagaagggacgccgagtgatcttgcttcccaccatattgaattggtagcacagtcacctgctaaagggacaaagtaacatgtcatggcccttctactgcacactctagctgacatctctgctgtgtggtggtggtggcatgctgaactgaataacagagcaacaacaggataacagacagaagcaaaggctcttttgggctctttcaggttttctaccatggtcgtttataatccatggagccaaggacctttagaaatagaagcatcttctttcaccatcttaggagcatcttgtgttgccattttgttctgcaaggctgacctaatgactatctttggaaatatcgtcattctcaagttagaatttgggtacttcattcctttctccgcttccgtggtccctgcccacaccaaaccttctgctcccagctaactccgcggttccaagaaaggttttggtggctcttcagtggcgtagcagtgtgagcaaagtccccatcctctttgccaggatcctgcctaagccagcctaggttaccacttctgttcctccttttccgtgagaccccttgcgatgagtcagaccagtctcctgagtacttggctaccatggctcaagtcttagacatacagggggggtttccattcttggcactacctgggtagagagagctattccgtgtagaaaccagctctgctctgctctcttcagtgccatttcaacttcagcacccaccctttctctgttcctcttttgtacccccataacatgttggacatatatggattttttttttttggcatattgacacatcaacacttcctcctctttggatcccctctgtcattttctctagcgtcagtatcttttgtccaggtctgtgtcttggggctacattactggtccacaatactgggacttcaggctgatcagggagcaagggtgtctcttcctgtccttcagcccagggttctcatctctgtgcttgctcacatgcggtccttcctcaacagcctagtgcagtactgctgctgtttctgccccttctcctaggtgaacaaactgagactcccagtccaccactgtagacctgggatctgtgtgtagggtgtcgtagcaccagaatctggcttcttaccttattggactgccttaatggtaccatgctctctctcctgattatctgcactgctgtgggcaagcagagttttttgttttgtttttgtttggttgttgttgtgtttcagttttctcctcagcaaaatagaaataaaaataattggtgcttcatacgattgtctgaggactgagtgttcagagtagggcccttgtaagagcttagctgtgtgtcatacaagcatctattcgttcttccttactgacatcatctaaatattattatttgtaattttttttaaaatcgcctcttgtgtgtctctggcctctttgtgatgctgtggctaggacaatccaggtctctgcacatggtaggcaagtcctcttttgacagagccccaccagaggtgcctgggagacaaactcgatggtgatgtctttgtagcagatgttgatctcaggcttgactttggcagtgtccggcctcagcaggctcagcagtgtgtggcagagggtagctgggggtaaaacatggcagtgctgggtagaggctgcagtcctcagccctcctgttgctggcaaacttttcccttcccaaccccttcccggtagctctgtgccctgccaagcgtgtgcacaagccttgaaatgacaaagtaccctttagttaattgcacaacggattgcctagagttaaaagttctgatttatatgactatagctctaactgctcaataacacaggcctgtaatctactttcatttcaaacagaacggtgatttatagggcagcatgccgctttagctcagaaatgaggtgttcaacatatgctctgttgacataaatttggaatttatcgctgttgtcaaaactgcctgttggacaaaggtgggtattaaggcaataaatggctcagaatagttttctgtcacatttcctaaccattgtattcagtctatttgagggaaaaatatatacttaaaagtaatcaaatgtccaaaatccatgcatcttgctttgaatggagaggagagggaggatgcaggggtggtgggggtggcggggacgtagagacaccgggagggggaggggcagatgtgggcggtggtgaagggaaagcggtttgtgaagttatggtccatttaagagatttcactttgctccctctcccatccccattaggaggtaggctttcctttctcatttacaaaaagggggaaagaaaaatgaaagctcattaaataaaaatagtaacggacatttttatgggtggacttaaagccagcaatgtcagtgaggagttagtgagcggggcttggagggaggcaggcagggattttgtttatggggaaatgaaggcaccagctggggttgggttctctgctaggttggtgagtgttagccttactcccaaatgcccccttcaagcttgaggttcctgtggactgggtgaatatttaattggcgactgatagcagttaaagagctggtgggcattgtaccccacccaggtcctgagtgattcattatccactgtgtgatcaatacccaccaatcactcagccatcccctcaacaatgtgtcttctcagtagctattattcctatgccctttgttggacttgagaattcagatgaataaggcaaagctgtcttctggttgcccatctagcaggtgagacagagaagaaagcaagtggagactcaccagtgcctctcgtgcaaccgtagacgcgcaagccaaggcaagggatgtggttctaggaggggaggcactaggaaaggtgatacaagctcatgtggccctttgagagcatgaagtccctcctgagagaacatgaggtcttgagaattatcctaccacggtaggacttcatttgtttgtttgtttattgagacagggtctcactgtatatcgctgactggcctggaacttaatgtgcaaacaacgctggctttgaactcacagaatgccacctacctgtacctctggagtgcttggattaaagtcatgtgccaccacacccagaggctctctactttgttaatgtatgacaaactgttggcatacaggtgactactgacatatgatcactgaattttttttgtattgtgtcataataatatattaacaacaacaaacattattgttattgttgttgttgttgttattgcagtgctatgaattgaacctagggccttgttctgctactgagccacgtcctcagatctgtcatatgttgtaaaaagcagagtcctgaagcctgtcaccacagcatctcagaacagactaccagggcaggcagtaggcagaacagggtgacttagtgaatggtgtcagtcaaggttaaaaatcaatctccctttttcacccctagtttcaagataagaacctgcagtcacttgcgggctggtgtgcaccatgctgggaacgaaagcaggcagatccagggagctggagcagggctctgtggcttgggccgtagctgctcctcgggggcccatgctctgtctgggtattatgcatggcccatgagcttgtcaggaggcagaggggcatgcgtgctgcctggtacttctcatgaaaacgaggcccagtggggaagaggatgcatatttgttggctttattttatttttccttttatctctgcccacatgcttggaccgtcttaacgttgataaatgtgcgcattctcgctcattctctctctctctctctctctctctctctctctctctctctctctctctctctcacacacacacacacacacacacacacacacacacacgcacgtcttcattctctggctcgtgtgtgtgcctcacatattatacagtcttgtgcaccctgaatatggacaccaattgtacccccccccaccgtgtggctcaccccaccaccacccctttgccaccaactcctgtccttttcacacaaagctccccgttgggaaaactcataatttttacaccacacagtcttgactggccattgcaggaattactggctctttgaagtgctttcggttggggcctttacaggctgttttaattacctgcagcttgcaaagggccttgctcggtccggcctttgtttgtttgttctttgcaagtccgtgtagaaagggaacctgctgccttcttccacacagaaaaggggacaagaagtttaggacccgtgcacagagcttctctgagcttcctgcttcagggtgctttgcctcctcagtcaagctcagacagatagggcaaactttacttgtggcttgcccagctgccaactctgtgggcccctctcttagaatttgccaggtattttgtttgtttcattttgagctacctgtgcatgtgcccaggccatgatgcagggactgggtgcgggggaggcagggcctgcttcggaggagttccaccctcagcaccaaacactttcattttcaagcatttctttcaaggtctaccttcagacctcccagtggagacaacagggctgtgaaatcacacagcccactgttgaccaaatcaaaattggtcacacttgagccaggatccctttccgatttttcagctaaatctgtttagggaatggtgtcattcgattattgagtctggacttcagatgcaggaagggggttgacataatatgtgtgagagtggtcatcattgtgggctagctggacttttcttcccttgtcttcgtttgcttttctatttgatgcctttaaaaaggactctttcaggggctggagagatggttcaactgtgaagagatcttgttgatcttgcacaggacccaggttcagttcccagcacccacacggcaactcccgaatattcataaccccagtttcaggagatccaaccacccttttgtgacctctgtgggcaccaggcacacacatcatgcgcatacataaatgtaggcaaatgctcatatgcataaataaaaatattaaaaatctttataaaaaaattacagcgactctttgctgttcctgttgagcctgagtgtagcctgtcctctgtgcaggtaatgaactagaacgccaggggagcatggggcttcgtcccttgaccactgcctacatggcagaaggactctttattgatttagtctaaagccatgttgtgctggtggaagctgtgagcatggctgatggatatgtagactggttcctcagtgtgctgagcatgggcgatgcattatgatgactgccagttccgtctctaggtatgtacccgacagaagtgaaaatggtctgtccatcacaggttcaaacttgcatgctgatgctcatagcagccgtgtttgtgacatccacaaggttgaaacggccgcctgtccatcatctggtgactgtatatacagggtgtggtacagacatacaaggacatgtattccagtgtacagaggaaggaggtagcctgtgtaggtctactatggagaaaacttgaacaagtgtgttctccgagagaagtgagatctaaaggggcccatcttatatgatgtccccatctgtgacatgttcaagatagccgaatgcacagaggaaggtaggttagctagaggctgggcttaaacagaagagagaagggcagccattgttagtgtagggaaaatattctagaatcagatagcagtgacgggtgtacacttctgtgaatgtactaaaagcaaaccctctcaacagtactcattaaaaaggtaaattgtagggtgtgtggataatatctcaataaagttctgtttagaaatacccactgactgtgtcccaggcttcctgccaggttctgacagcacactggatagcttctgccttgacaaagcttgcagtctaggtgagataaggaatagcaaatgcccattgggcacctgcagggaatgttagaccctggaaaggagactgagaaagggcagttacagagcactgttggtatagaagctaccccggcaggctgtggctctggcacagttcggcttatgtgggagttggcacacatgtgcgtagcagactcagcatgggcattggtaaggaaagagtcaacgtgtcctccctgaggtgcatcctgaaacctgtgtgaggtgatcctggaagtggagtgtgggggccattggtccacctctttccttgggacttctctgtgctgctctgtagctcaggttgggaagtctagtccagtgtatcttttctggctggtggttttcagaaagccccttcaatgtgaagtaaggtacacgctccctttgggactaaataacctgagatgacctgattgtgtatctctccccctcctcctcctcttcctctccttcctcctccttcccctctcccccctctgggtgtatgtatatatgtgtctttcttaatccctccctcctttcttcctctttcttcctccctcccccttccttccttctctttccttctttctccctccttctttccttccttccttccttccttccttccttccttccttccttccttccttcctctttctctcccccttccctccctnnnnnnnnnnnnnnnnnnnnnnnnnnnnnnnnnnnnctcccttctcctgtctgtctgtctgtctgtctgtctgtctgtctctctctctctctttctttctttctaccgagtcttactgtgagcagccctggctgacctatatctctctatgtagaccaggctagcctcaaagtcaagagatcctctgcctctggagttctaggattaaaggttttattattattttttccctcattggtctagaagaaagtggtgggattttttttaggggggggtaggttttgttttgttttgttttaaaataacaatctgtctcaaaactgacaaatctcaatctctattttcaaactgaaaaaaaaagtaaaaaaaaacctctgtattcccccttcattaaaatgacaataatttccccaccgtgatttgagtgtgatttgatgtccatagagataatctgcccagctcattgctggtgttcataactgatgtaagagagcctggctttctagctcagaatcctcgtagaaaagtaatttaattttcagtgtagtaagctggaagaatgaggcaatatacattaaaagggttttcagagtggtttaattccgaaggcatgtgcttgcgggggctttaagagacccccgttggtctctacagtggcccgagtttgcagatgggtccctaggatttacatcagcatcctggtcccctggctgaagtggaaacccaagaaacaattcctgataaccaagaggcaaagacatcacctcccatactctaacactgggagatccccaaagtgtctgcagagtgttcaaagctgttttcatagaaactggctatttgtgctagagaaaaaccttgtatgggagacagagagaaagattaaaaaaaaatcaggccctgctcctccataactgtagcccgattcccttatagggccccgagggactggagagatgctttggatttattcttgtttcccctgggctgacaccatttagcatgcaccacagtaccctgttttgggtttggaagaagctcaggcacgctataaatcttgaagctttttactatttttcctctcctctcattttctttttcttttctttctttcttttttttttaaacacgcacacaacttttcttctttgttaaaagaaaaactacaaacgcgtgtattgattcctgccttcagatcttaactgccttggctgtaataccttgcttacatctgccaggtttttgtgcagtgttgcaacatctccttaatccagtgagcataaatagaacatttcagtcatatttggctaccagcaactccacagataagcatgctataagaccttgttgaaagagactgtatgtgattgtgtgtgataccatcagcccacagcccagagcccaaatgaaaaacttttgttcttggtgaaatttgttgatagagatatttcaaataaatgacttgggagaactcagtattttaaaacaagggttaggttatgtaacatccaggagcccaggccacccaatgctcagaggccctgagggtccatcttagaaccctgtctcagggagatagatcaccgagttacattgtcacttcctatcctgccctcccctctctttttcttcagttttcttttctcgagaaagctctcattaaatacagtcttgactgtatttaatcaggttgtccttgagctcacagagatccacctgcctctatctcccaaatactgagattaaaggcaagtgctaccaccacctgtcttccgtggtggtagcacttccttaaaacagggtctcactgaatccagagtccatcaactgcttggatcagctagcccgtcatctctagggatccgcccatcttctccaccttcccagtggaggctcacagatatacaagaccatacccctctttcatgtaggagctgaaggtctgatctgagaggtccttgtgctgcaccttacccacagaaccatctctccaggcctcagatgcttttcaaagcataggactatcccatcccctcatcagttggccaggtaggggtcagtgatgtatgaatggctttcatgctgagagccggtaatagggatggaggagagatttctctctcgggcaatgggtacagttgtactgaagtgggtgggcatgtgtatagagggaaggcaggcttctccatctcccacatttcctcctcaaattccctttgaggtttgtttccgtcattttcataaggtgcattgtgcattacatgaagccttttgcatgtgctgtggacccctcatgagaggggtagggtacagccagtgtaacctgcgtcagccccaccaccttgcagcttatgaagctgactatcaagaatctatgagatcatcttgatctagccgtgcctgcctgcaaagatgcaaagggctggagagacaagagatttgaccgaggatgtctgctatatcctaggatagctggaatgaaaaccactgtcctgctcccagcccagtagacacataagcctggtcaatacatagcttttattgagatgattcttgagaaagcatggctccttggtattccttctccttcccttacagagactccaaatcaaccagaatggccccttgcctctcatcttctgtgagcctgcatccctagcaaacctgcagcagggaacgtgttaaccaatactgttcgttctcattgtttttaaaatcgcttctttgaaatccttggcttttattagtatatttactttatggcatacataaagatctgtattaaaaaataaattgtgttgtaaaagcattgggtaatgtttattaatattgactagtcaaagagccatggactatattgctagaaggataatttgtagtaataccagctatgcatgtgcagcttgtcaaatgactgtctaatctccacatttttaaaaagaagcggttgaaaggacaatttcccttctgtcttgagaaaatgaaaggggactcatgcctagctgagtctggaactgtccttgcccttcccctgtggctcaagcaggctttcaggcaccaggcaggtacacgggactacgtggcagtggccaggtgtgtccctttgtcttagagcagttagagaccacttcactagaagttctgtgtctctgtctgcttccgtctgcgttaaaggcagagatggaaccatgattcctgtccttaagcttggagttctgaggaacatggaaacagcttagtcttgagtgatgtatagcacaatgacacaaggagtgactaatgacccctcttggaatatgacacggctgctgacattaggaaacattctctgggaagatctaatgtcacctttagaaggtagggaacattcatcaagtgtcctcaggccatctgaagaacttgctttggtttagggtggaggtctgcagtagcactcatcgttcaaaggttttctttcccatgaagctccatgcagggggctgagcatgttagtacatgttgtgatcctggcattcgagaggccgaggcagggggatcatgagcctggagccagcctgggctacagagtgagttcaaggtgagtcagggttgtaaatcttgtgtcaaaaacaaaaaaacaaaacaaaacaaaccaaggaagtggacagacaccaaacctgcagaaaatgtaggaggctgggctgggtagtatacatagcctccatttccccggaagttggctttgtagaggaactctccagtgggctcatctttgtgccagcacttcctcagaataccgttgactggttgacctttgacctttgacctgtgaaataagggtctgtgagcctcagacttaagactttaaaaaaaaaaaaaaaacaaacaaaaaaccaaaccacaacagtcttgagaaaggtgagaaaggccaagattgaagtctcttccttctctcagtttagctgctgtttagaaaggtgaccgtgcccagctagaaggttttgcagctgtgctgagagtctgtttcttttggtgctggaagctttggcctagttcatgatgtccccacagggagagattggctgggagtcagtgtttgttgacagagaggcccaggcgtttcgtttggggttagttagcttcgcctgtgagtagaggaccttctgagagggttgctgcttgcatgagcttttgagagtgcatttagaccttggtctgggtgtcattcacatgaagtcttgtttccttcttgaggctgccacagaatcaccaaatgggtcaaatcctgtcaccttgacatatccagaatcccctgagataaaaaggctcaaggagagattgtctccattgggttggctggtgtgcgtgtctgattggctgtcttcgtttatgtaaggatgagcttgtctatgtgtgagtggtgccattccctaggcaggggatcctgagctacctaagggtagagaaatggagctgagcaaaggcaggcaggcaggtgagcctgcagggttcatttctccctgctgccaactgtggatgtgcctggctgcttccagctcctcacgctgtgacttctctgtgacggtggacttgaaccaggaattgtaagcagaaataaactacgtcctccccctagtagacttcttttgccaaagcatgttagcatagtaacaaaaatgaaactagtacatctggtcgtgaattagaaggcaagttccctagctggggtttgggttgcagacctgtcaccctgtctcctggaggctgagaccctaggaggacagcaggagttcaaagcagcctggtgacctagggagatcctgtgtcacaatgaaaaaaaaaatgaaagggggagtgtgctcaaggtttttagtccccagtaccaccaaaacaaacaaacaagaacaaaattggcagtgtctgggactgccataaacagtttagcctctgaccaggccctgagtgaattggaagaatcttttgggccttattggcctggtctgagcattagttcagaagatatatcaattaaccaagaatgggtcaaacattgtccagtgtctggctgggcattctctgccagtgacttgtcctagtttccaggttccctgttctgatctcttctccccaaaactcacagatcacactatttcagcttcctctcagcagagtgagggagtacagcccttgggctactgaaacctcgagcttttcccttcttgctagctagtggataagccccatctttgccctttatccctatacaaaacacgagaagaaatgtggtgtggccagtattgggccttgagctccttcatcccccaatccacaagccaaagcctctggtccttttcttttggcaatgccctgaagctcctcctcatcttgtctccttggtcctttgctgagtgggtggaaatgtacaacttctgcagagggcatgcattcagggctctcgtaaggttagggccagctgtcctggggattgaggtagtgtcatgaagagtcactccttgataacatgcatgttcttgtgctgtcccttttgaactgggttgatggaggcctattctggatgggtgaggttggtgtgaggctcaacatttatctttccagaaaattaccataggccttccttgtatggatgtcaagagacacaagataaggtctggttctggaatggaggttgcctgtgtagctgttgtattcagattctttctaagataaagagaatatagacctatacctgcttttcctagaggggtttctttggctttgaacagtccctttaaaatgggtcttagaaagcaaaggcaagatagacatagcatctgtcattgagcagttagtggtccaaaccagacagaatctccatgccttgcagactcattgagcacagacatggtcccagtgacaacctggccagagtggttttataagtgagagctacattggagagaacaatgagagaaaatgagcccttctcttgtgttactaaaaggttcagatttgtgtagatgtaattttctcacagtgattctctgtcttgaggaaataggtagatgtgttcaggaattaacttttttatcttcttgagtataagtgaacttctgttccctgcacagtgagttacttttcggtcacatgttgtcggagatagatggagccactctattacccgatgactttcaaaatggcggccatcagtctggcttactcctggagaatgaacacatgcctccatcatcaagggaggcagtgcaaagtaagaaattaagccttgtgaagacaggacaggattgggtagatgtgttgaacatggccaggagaaaggtaaggttggcattttggtcaaaaatctctgcagaatgtggcgacagtgggtaaagagaggtggcctaggacaaaggttagactctgaagactgtgccggagtcggctggttgctgggtctgtagaatctactcatttcttctctgccacttaggctttcttggaattgagagaagcctccatgttagatcttcttccttgctgtgtaaacaataacttttttatttttttaaatgagcaaacttaatatagggcaccattgacgttccaggccggcctgtgaagttgcccccctctttctgtcttgaactttgtatgctttgcgtggttctccctgtcaacggtgacctttgtcctggctacatgtgatctcccacggatgccatgctgggtctctgggaacctgtgtggggcactgagttagtaggtcagtttcaggacagcgtgctacccccgagaattgggtaagagaggatacacgtgttactgaagaaacggtgactgaaacagttcagaggaaaggctcctgatgacttctagaaggttcatttgctaagagaaagacaagataaaggcgctctggattagaaggttttaaagtgcacagattgctgggttgggtttagagttttgtttgctatatcatagcctatgacctgggtgtcacagtacattacaataggcagcgacacgaagatcgtggcccaggaaagtaactgtccctttcaggaattccttggaggcaaagtcaaataggatatgactgagacttttgaataattaaacttatctccgcctacaattttagttactaagctatgtcattttacaagtgagaaagaatttgatagctgggtgtggtagtgcacactttggatcccagcacccgagaagcagaggcaggcagatcttttgagatctcaaggccagcctggtctacagatcgagtttcaggtccatcagcccttcataaagaccctctgtctcaaaaaagtaaaatataattcaagtgggtgtgacaatatgacttgtccaaggtctttaaaccagccagggctgggtcagggtgagagccggttttacatctgtgtgcttggccttcctccttgtgccctgcaaaacgtttacaggaaacaggctggaatccatcccctttcacacagagccagtctggttggcaactggaagaaaagccactttcagcaattgctgagcaaatcttcccatatccggggaaaaggcaaggctgttacttaagagtgttgatcggggtgagagatttgatctggaactctggaggaggaatcgagtgtaggctgttgggggtgctccccagatctgaagactgaccatccacaatcctttggaaagacaaatgcatatggggtcctcctatgcctcccaggcagggacatccctggaagctaagaaatcataaatgattaaaaggtaacaatcagttggacccaactcctaatcagctttcaggaaagcacctgggaaaccactcttgaagagtctttgtgttgtgtagatcccttagaaaggcaaatatttatcatgcccaggcaagggacaggagtgccccactgtgccccacccctgtgtatgtgtgtgtgtgtgtgtgtgtgtgtgtgtgtgtgtgtgtgtgtgtgtgtgagagagagagagagagagagagagagagagagagagagatgcctgggtacctatttaaaaacacactttgccccaaacactattcggacatgccccagtgccctgacattgtgaaatataatcagagtaaagaatgttcagttaaaatgttccgtactctttctcaatttggatagatcagccacagccaagagtgagataacgcatgggggatgggtggggcgccctagagtgttgtgggagactgtgtgtgtttatgtgtttgtgcttgagaaatcattcgtctttggcaagggggaagaggaaggcagcaaacagaacaatacgattgagaaagagttctgcaaagaactgcctgtgatccctatcgggaggctgcacacacggcgtcgggtgccgtcctcatgctaaggtggccccattgcttggcatgctaccgaggctcccctgggggccactgaatggttagtacagcacagggatctgtaagttggtagtagcagtgtgtggttgggtgtcatttgtgatttggcaatgccagttccagtatgtaatatcacctggttttccctagcatagccagaaccagttctgcagcccaccatggttttatagcacaccgtcgtcattctgcagcagtagtgaaggctctcagagagccccatgtctcccacctgtcccgctgccctcagatcctgtctgtctgctactctctactctggtccttagtgacaggggagaaacagagattggagtagatgttgtagctggatcctggatcgagcagtggcctctgagacttgaggaaaggagtgcgatggaaggagagtcagcatttggggccagctcacataagtagctcagagcccctcccagtgctcggctccctacttgctgtcccactgagttccttgaaaatgaccagttccatggcaaagggtctgagcagaaacagcccagcggagacgtaggataagaggtagcattgtcttagagcttttgaccagttgttgccatggtgatgacatgccacttcatagaattctaccggtggtaaggagatgacaggtatggaaggatcttggcaggataaaggaccttacttattcttggtggaagctgtctgatgtttttgcaattcttctgtctgtcagggttggaggtggggtcatggctactctaagagcatctagctactgagagaaagagagaagcatacttgttcatagaacctgttccttcttgggcccatttggaaagacccagcctttgggccttagagatgaggagaaagacaaagacgtcagtgtacccttctgagtatggcagatggcaggagcttgagtctggcacagcccagtgatgggtaggagagggcatgagttaatgctgcctggaggtgagcaaaggccggaagggcttgatccaggatgtgtatagtttgacagtgaaccctcggtctgtctgtctgtctgcgtgccccatatgctgaaacctttcttctgaactcagatctgatttccgagtctgagtaccagtgttaaagcaatgaggggtgttctagaaacatgattaggaatggatacagcaatccatgggtactggatccagcagtccatgggcacaggacatatggggattgtcccagaatcaggaatgggatgagactctttccagtaccaccccttaccaccacctcctgttccccctggagattactctgaaagcctgtaggcgtgtgtgtgtgtgtgtgtgtgtgtgtgtgtgtgtgtgtgtgtgtgtgtgtgtgtttaggagggtgagccttctgtccagtcagagcagtgacaacctgtcttctcctttcccctacaggaaactgcacagtgggatgaaaacatacgggtgtgaactctgcggaaaacggttcctggacagtttgcgactgagaatgcatttactggctcattcaggtaggcaaggtctccttcagtgggccccctcctgccgttttcacccttaactcagagctggccctggtctagttgtcttcactgccaaccagggctttggtccactgtgtcccttggatcttccttccagttccatgttgcagaagagccaccctgcgagggtgcccatcagaggaacctagctgtatgctttcccctggggttcccaggccatcactggaacccatgccctatgcgatctacctcctaaagtagactgcagtttcattagcagaaacagttgtggaattaggttctcgctgtctaatgaatctgactattgggttcacattatacaagagcctttaattaaatagatatagaaaggttggaactcaaagctagttatagcgagctgtcttttgcaagttaattttatccaattctagtggggttgagtatacggctgccagttattttgctcatgttcgggcaaagctgttctgccccagagctgggtaaagaggggagaagcccttgacaccctttgttcctgatgttctgggtactgggaaggatcctgcagacttggctaaagcagtggcagttattggtagtcacctacataaagagagcaagaccaaagaagatgggccgcttctcccctaacatacgagtgcaaagattaaaggcgaagctactatagggagaaggttatgacctgacagggaagtcactggtgccacagaaggcaggctgcaccctcagcttaatcaccttagcatgtgattccaatccccactcgtgacactaatttgacactgactgtctgactgtggacaaattcagccgtccgtctctgattgtcagtgcagatgaggtgttgccctcacatcgaggtggtttttctgctttgagaattggatgaaatagtactacacgtctccatagaaagttccctggcctgcatgcagtaggtgattcacaggtattgataggatggcttctacctagacttccttccgtgttgcctacctctgaaactgtcaccccggggcatgccttatcatcttatcctggatgcttccagcctggtgggttgtctgtggatgatggtgtaagttctcgtcggcagctctgtggtaccccactgaaacttagctgtgtggctcacgcggcttcattcacacagtggttacagagtgctttggttctgtttgtcttctacctgcatggcagaaaccttctcccacctttccaggtttttccaggctctttttcaaaaacaagaccacctcagccactccccactttcagtcagaggtaatcatgccctcctctggcacccatttctgtagctgatgctttgagcacaatccttcttctgtgtcgctgttttctctgggcttgccttatctcccctcttgagaagcaggataatggagtgcggggaaacttgggcacctacttcctaatgaggcagcttggcctttcggagcctcagcatccttgtctgtaaagcaggaacggttaactcaaaccctgagagcttagcttgtaaggctcacacaacctttttgcccctatgccctcggtgtggtgggtacttggtaagtattaaccgacagcaaactgctagggcacaggatcaggccgacgttacatctatcattgcttggcatcagcaaatgcttagatgagctaatgagtgcagcctaggtaggcatttgatgagcacctcgaagactctacggtcctgtctggcctcacctgcagcagaaatcctttcatggccgaggggcttcatggaaaggggacaccctagacccactcttccaggcaatggaagcagacgtgacttggccaccagctctgttgtgaacccgtgtctacatacagtattggggagtgtggctaagaggtgctgagagctactgagctctttcttttaggtgggtttggtgtccctacttctgacaagatagtgacttctcatcactttgctgcaagctggctcgtcccgagggggtgtccactttggtcccatctaagtcaccacttgagggtctcatggtctttatgcttctccagcctcaggaagtgggctgtgttttcttagttttccattatatgtttggtccctctgaaacccatctgccaatgcccttgtgagggaggggttggtgatgagttaccattttgttttaattcaccccggcacacagctacacagctcatagcctgcagagtctgagactttctagtctgtttttttctttttcttttttgtcccattgccttcagtcacctcactcctgcaggatgtcttgatgtccgagaagcaccaaaagccagggagggtagaccacttcctgacctttgccccctgtagagacttgaatctgctgcaggttaaggtctgggtctgaggggttcctggtcttctagcaaccacgacccccatagcagataagggaactcggttgcattacaggatataatctcagcacttgggaagtagaagcaaaggggtcaggaattcaaggccagctacagctacatggcaaattcaaggccagcctggttacttaacaccctgtctttaaaaaagggcaacttttgtctgtctgtatgtctatctgtctgattgatctacctannnnnnnnnnnnnnnnnnnntttctctggtttgaaggctttgtgttaggaactgacagtgaggcccacctcaggatctgtagtgcagacccagtttatagacggtaaagggttggagctgggaagatgaatcactgcctagagcctagggagcctgcttttgtccttctcctttgttttttaaggacaggctgtgtggagacttgaactccatcctgggcaggggttctgggggctccctcagtgtttccgctgcggcaggccgtccttgccaggctcatcctggttgttccttctgctccaccaggctgcatgcctctcccttcctccctctctagctggtgctggccgccccaccccctcttggctagcacagcctgtgtttgttattgtagacctggcactgagccaggtctggctgcgagccagacttgtgggtacagtatgtacagtgtgtgctcagccaagtttgtcatcgtacgcgattatttttttatattattttttttttctgatctggaaggggtggggtgaaaacaggagtttttgcgatgccagaggagagaatgcactgaattccatgatcttatttctgtaaggaaggactcgggtccggcttgccttacctcttctgcatctttccttttcctcctgtcctcttcctcctcctcctcacttccctatcagatgaaatcagcctgaaggagatcaacaaggcaagctcttatttgcagtgactagaatactaaatttactctcttaaatcagttttcattgtgttgaaattgacaatttgtttaattagaagtttgccctgtaggaggcccttgtgagaggctgcgatttctcccctcacgtctctcttactttctccttttcagttgtgctgggttttaagaccctaaatggtggtagtgaatgttcactttaattgaagtttcttgcccgatttgaatgctttaactacccaagtgtttatgaggtatacctgatgataacagtatgtttaaattgaccaccatcaacataactcattaactaatggccaatctggtccaaatctgccttttagagatggttttggggatcacaagggcttgaggattggggatatggctcgtagagggaagagcaatgacttccactcgagtttttgccaaatggtaggtatagggctgtggcaagcagcagaagagtcccagcccactgtccatgtccagagatgactctaaaacctcgtacactgccatgttcccatgggagtcatccaggaagcattgacaggtccccatctctttgcatttgctttttcaaaagaggtgatttcccgctgggatgtgaggctggacagaccacagaccacaggctgtgactcagtgggttctgaacctgccctgtataaaccttcccattcggcttatatgagcttgccacaccttggcttgacagactgccagcttataaacacactacaactgcttgctctgttttggacacagctgtttggttggaggggtctgggtgtctaggtggtcaggccccatcctgggggtatcgtttgcttttggaccgagtgcatgcttaatgtgcactattgggtgaggctgtgtgcattgagcagtgatggatgccacagcatccttcccctcgaggaacttggtctagcaggaggcatcaggttaattataaaacagtggtgaaagagtagtaccaagtgtcaagaaggaagggttggagagcttcagatgatgcggaccctgcagagacggtgcgggcagtgttccggagggatcacagaaagccagactgtgagaatggtgggcatcacttggggtggggtctgtgggcagggtgtgtggaggacagaggaaggtatgcagggcccaggacagaggcatgagaaaaggggaagggtagagtgatttctaactccccagcactggaagactgcatattgagacaggaatgaccgagaacagtgcttttccttcagaagggctgctgggctttagctatcaattggcctggactctatgatatggggagacccttccagagtcacgataggtagctcatgatggccatggccatggtgtggagtaccctgagctccccacactagaataacacactctttcccttggcctggtgctgtcagccatgctggttgagagtctactcctgtgaccaggcttgtctccacactcagagtgtagaagaggaacgaaggcttgggctgatggcttttacagttttcgtgggagcttggggtagcctgagcttattctctgaggcctgagtcattcagggatcaggggaaagtgctagaaaagttgggaccagaagcaagattggttttcttaggctgttgtgatggggtggagtgggggatacaagttggcaaagatgagtgagttgacctgcccctccctccctccctccctccnnnnnnnnnnnnnnnnnnnncgagtagatcgcgcccgtcatgtttggcggcgaggaggataatagttggcgaagtgtttatgaccgtacaatagacacgaacgagtgctcaggtcagcatgaagatcccccataggtaacggggcgcacagtactcccgcggacggaggtgagaccggggaatacgtattcaaccagctgttcgtcgcgtcagtttctgccgtagtctcgacacccgttttagcgtcgtaattactagaaccagtgtaggggaagtattcgtccgtaaccatactatagatgggcgccacgatcagacggtttacccgcgggtaactccggatatgaggagcagatgcgagagagttcctcgacgatagagcagacgtcgcctaagattcaaagtagtacgcatatggcgtgatgtactggccaaccgagtatcagcgtagttccgatcgtatcgcgatgggccgttgcgccgttaccgaagaaggttacaataccatctgaggccagtgtcgcgagggggagaagccgagggtggtgcttcacgagtgtgcgatttcgagcagagcaacgtccgagcagcaaggcggtgcgtggaggtacagggtgcccgaaggggaagacgaccgtggtcaaataaggggcgagcccgtaggaaggagggtggtcccagaccagtagcgaagaggggtgagcggaagagacgtgagaaaggacgtccctccctccctccctccccatccatcacttagcttttggcttcagggttcttacagacagaggaggaaggaaaggagggcagctggcaagtccctgtgactgctaaatgaggggtccccacagtgatcatcagaaaggctgccttaagagttcaaagatggcttctcaggacctgcagctcggaattggccaggcacaggagagtcctagtctataggcactccattcaccctgcctcctctctggaggatactaactttcctttttgctgtcagggtaaaataaaaaaaaaaaaaaaaaaaaaaaacgggagacccttggatatatcctctctggggctctttaactctctcctgggtcttgagaggtccccaccctctgaacattcctttgacagtggggtgtctcggaggtccacacactggggtggcagagaggaacaagcagggaaagtgctccccctcctcctccctcttgaacacactcttcgctcttcctctccctcctctggatttggccagcttcctgaactttttcccagagtggtgtcgtcactggcctgccggcaggtctggatgttctgccagcattccagagagtttatgatcgcttgcagatgcgtctccaagaacacactgtacccaaagcagaaattaatgcaggcttgactgcggtccaagcccctacacgggagagaggagaaagaaaacaaaaactgtttaatgctgtttataaattatacactggctgatgaaaaatacatttctttcctgcccccttccacgctggccccttccctgtggccccctcctcatccccccaaccccgccccttctccatttttgcctccagagcctcagctgagcgcaggcgaatatggttttgctttttagctcctgttttggctgggatccgaaaccctgcctctgattcctagcctgagtattttttcccctttacctgatgaaattcactgatttttccagcccacatgggttgttttgggttttgttgtttgggtgggtagttttttttttttttcttttggcctcgggttttgtttacagcatgtgtcatatgcaatggcgcagggtgtcaggcttactcgtccctggaggataagtgccccctccccacatcttcccaccttagagtcactcagaggtcccaaagccttcaaggcttcacctcaggctaactgaactgagaaagttggggacattcttcacaggtcattgtattaaacagtatttttccaccagttctcttccagcctttcacctctaacccatgtgaagaaggggttacatagcccccagtacacacatctctacttacatcagtgtagcaggaccagagaactcattcctttgactcttctggaccccacccagcttcatcccacaccctacaagccccctcccatcccaatttattctataaattcgtttctacattatgtctatccacttacatggcttttgtgttttttaatactgctaatgtttatcatttgcccaacaggctcgacagattttgcttcctgtagagcattgaggctttagagccccctcgttgctaagtagcagtctctctgtactgtaatgggctgattttgtattctgttcagcgctgtatcttatttttgtatgcaagacaaagtgttttgatggaggacgattgcagcagtgtctggaggctgtttggagttttatgggctgtacagtacactgtgtgctctccgaacagaacacaggctgttgaattttggattggatttgtcattcccccccccccccaacaccctcagagaggagcctgtcagatagaacatgacttcaagggtggaagaaagaaagtgggaattatgtaatatctcctttctgtctcccattcattctctctctctctctcccccctctccctccctctctctctctctctgtctctctctctctctctgtctctctctctgtctctctctctctgtctctctctctgtctctctctctctgtctctctctctctctctctctctctctctctcatctctctgtccccaaagaaggtggcacaccccttccccattgcagcatgattttgcacagctaggtggtgacgtttctattaggaatgaacagtgccctagaggagagggtgggacatctgtccgactgctgttcattgggaatctttctttgcttctttccatcctgcttaggtcccgggtgcctttactagtctttgatttttgtctaaggatgagtagcatctcatggggagctgcaggacagggctgttttagtgggatggacctgaaagcaatgaggtttacatattctcagagtcctcatatcttggttgggttttctgcatacgctgctgccacccacccctaacagaaatgtgtttctgggtggactcccgtagccatcttttcctctagcttctgctccctagtccttgagccaggcagggccagtgttgttggagtccaggtctgtgcctgccctgccactgggccgctgctgttcctccccgtgctccacgcaggggtcgggtctctgcctccctccctctgcaggtgtttattttgtctctctctgctcctgcttctcccccaatctccttccatctcacttcatctctttggcaccgtcctgtgtctatgtcagccacagccgctgtttgacactgctgcgtgttttctgtcttctttcctgtgtcttcatctgtctctgtcactgactgccttagcctgccttctctcatctgtctgttggtctgtctgtctcctttcttactactctcagtgttcctgagcttagaagttagacatcagtcagagtagggaaacttaggtcattctggcccaggggcctggtgaggacacatgactggagagagcctgaggcacgtgtgcatgacccctcgcattgaaacgacaagagtgggtctgctcagccatgacttcggtccttacacactattttttaagtggagtttgtagacagaagaacgggcttagctctgcgaggtccttgttggacactgtttctcaggatcccatcgccagagcccatgtcgacacaggtgtgcgctgtcacctaccagcgcatggaagcctccagccgacccttgctaattctcctgtacttgtgatctgggaaagggcttggcacacagaaggcttgggttgggatttttgaatcagtgactatcatgtaactaaaagtaaggtgtctcagtgggtaaaggtgcctgctaccagcctggtggcctgagcccaatccctggaacccgagtgaaggtggagagactggaccttttgcagaaaatgtgttgactgtctctgtgcctgagagaggggacctggaggtgatagagatgcctgtagagctcttaaggtttgctctgtggaactcaacagattcattgggcccaggctaggttgggggtaaccttggacaggtgtttagttaagaaggtagctccttgttggaaagtctggagaaacagccaaaaatgaggggtagaatcttcaccagacaccgagccccagcatgtgtctgtgtgcacacaagtatgaggggaaaaaaagagatggagacgaagcatttacatgaaatactgaaaattgtttctttgctgtaatgggtccacacaggccattaccttgaagatttaaaaccaaaatgagctcatgatatctactgactgccacggacatccatgcctgattgcaaagcccgctttacctttgaatttcggcttcattgttggttgttaatctttggatgttggtggcaacacacacacacacacacacacacacacacacacactccttagattcctacaggaacaagttaatggatggatagataggagtgtttctcaacaagaccccagtgaagaacctttccattttcaaaacggcctctgacctctcaggccagctgagcagagttcctctgaggaatccagagaacagaggccgagactctgtgttgactttgcggggaggggggggggagcggaagttcgaatttttttaatttaataatttgggtttcctatgaatggttctgtgcagtgtgcagtagtatgcattttcataactgtctcttctactttggataaaaggaagggagggggaaataacagcagcagcgttctgtgggcaaaggaagaaaacaagagaatggggcagagaacaggctaaatttaaaattgtaattggctgacttccactggcttgcgggtgttttaatgactcataataacttcatttaaaaccagctgagcagaaaatagattggagaggagcctcgggccattatggatttgttttttttgacaagctcggttttcagcagccaggaaggctctcagagagggctcggctgtttctctctctctctctctctctctctcatgactgagattgtgtgcatgtgtatacacacacacacacacacacacacatatgtatgtatatcagagatagacagtttctctttctttttaactcttcccccttccccctttttaatttttttaactgattaaaatagatgcctcggggtattattttagcattttagaatcgctgctcccacacccacttttgatgtggtaaacagaacataaataaaattgttttggagatgattgaattaattaggtagtaaacaactccaaagcataaattccctgggctggtttgttcccaccctcatccatattttctccaaccccctcctctccctcagcccctccttccacaggacgagaccctccctttgactgggcatgtctcctctgccacgggggtagctgtttggtgattcacctgcccggcacaaattgctgagattatgatgggactgggtctgtccaggaagttttaggaattgccagaagaggctctgacccgcctgtagttgtttctaaataaaatcctgtccgtttcccatgctaggaacagagccaggaccagagacctgctcccttcttttcctgtcttttgaaagtcagcctgctcagccccagggtgagcctggccagacagtgcaggaggcctcttccatctgattggtctcagtcctcctccatctgattgccctcagccatctgttctcccaaccgccccccacccccgtaacctgtcaccttcttggttcaggagtgttttttttattcacttgctcctttcatgtactaggacctaggtttcttggggacatgtgattcgtgtatttctgcgttcgtccatgccacctagcctaggaacacctggcctgtgtaaatgggtggaagtggggcaggaagtgcaatggaggctctcctttgctgcctccagccctggggatcagccgtctggatccgaagagggaggcagagaccgtaatagtagcctatttgcttgcctctctacagcctagcacacagtaggcagtgaaaatctactgaataaatggctgactttgggctgatggtcctggattgggacacagagaaaggcacatttacttgtgcctgctatgttccagacatcgtggagtgctggtactctgacagctctgacactcaggtgctcctttgtagatgaggacactgagacttacagcatccactgctgagcctgtctgagatcagaaagctggggtggggggttggccagggctgactcccacctagatctctctactgttgattgtcaggattcttgcttttccatctgttgggctcctggtgccttaaagattggggaggtgagactggagagctgagaggaggaaggcctagtctttcgagactctgaggtagggagcaccttattggatgctgctccatttggccagccaccaggagcaggtgtggcctattaacctttcctgctgggccagggcagcatgtgtccgctggttgcctgacctggccactctttggagggctggaggaaggtggttctgggcgcatcactagatggttcgtaggtcagacagcatgcagcttcaacttcatggagagcttgacagtggcatgccctttctcctctccatcaccatgccccactagagaggagggagagaaagacagctacccgtggtctcatatcttttcttggggaaggcaccctggggttgggagtaaatggcatagtcaccatgtgctgccactctgaaaagaaggagcgtgtggcatacacccagcacgtggagtgtgacttatccctggcctttcagaccttgtccagtggagctgtatcctttgacatgagactgttttgtctactgtagaacaaccttggtgtccctccaggcacacactgggggtgctggaaccttctctggaggggtaaaatcgttacctagtggtaaccaggtttagaaggttggccagcagaggaacttgcccgaagtgctattctggaacccacctacatgtacatgttttagagagaggagagcagatatcacatgtatgaatttggctgttagcagctggactgaatggccagtgtgtgcaaacccaggcagggcagatgagagttagtgctactgtcctgacctgccttctgctagtgagccagctgaaaggatcacatgagcctgggaagggaagggtgttcactggccccacaagggaaacaaatggctgctatgggagtttggagctatgagactgtcccttggatggggttggtagggggagtagtccagaagagggtgggcagtatttaaatggaggaagagcatcctctggcagctgtgtccaggaggagctcagccgtgaggaaaggggctatcttcattttccatggtgaagagagcaagaacatctttgagctagaaccagctaggcaggcagcacctctgcacttctgcctctggtgtccacagtgaacatcaaaggtttataactccacctgagggtcctccagtatagtggtcctccttagtggccagtcgagaagcactccagtgaaaaagaagactgcctggtgtgggtaggtggggacctggcatccagcacctcagcacttggaagacagaggcaaggggattgagaattacaggccagctttgcattagaagactgaggactgggagttcgcttagtagtaagagtacttactcagcgtgcacaaggagctatgggcaatctcaagcaaaccaagagagggagagataggtagatatgagagagggggagaggggtcctgcaagcttcagcctgtgaatacagtgcatacagcattgcccttgggtgaactgaaactactaggttaccctaaggacaaatagaggatctatgaggccttctcccaggtgaacgtcaccccaaatcccagaccatctctttaggtcacatggtaaatgtccttatgtgtgtgtgtgtatcagtaagactgggctggctccctcgggatgaaggcagcaccaagggcttctctaaggacttggctgagtccgggatccagtatggtacacgtgcctcttctagactcagcccctttatcctggcccctagtagttggcacactcctttctctttcccctagccaagcccatttggaacagaagtctttcacttgccagagaaaaagaaaaaaaaatccaagttctatacttttcattaggtagttgggataaaaagccttctggggtaggcggattaaacctcgtagctctctcgctggctattagaaactaattgagcacctagcgctcgctcgttggcactgagttctgctggcgtaattatgcaaggccacagtcatttcagtaacaaggtaactccaggtaaagagagaaggatgccctgaaactttcagatttttccagagtcttcctcagttgctttccttaaatgagcctgggacagacaaagcccggatatgagacttttggggtaagctgttgtcttgggtgacgactcaccccagcctgagttcttccatggaaacggcccaggatgtgtggtagagccctgctgtgagctcctttggtcttgattgaggttggggacctggagtcacacgccttggagtagaggatgcagaggaacctcttctgcttggtagacagacgagccggcagtaaaggggctgaattagagagacaatagactcccagggcagcgccttccacaggcatggagggcagggccagacacagccctgtaataaggtagatggttactttgtgtctatctggacatttgtccagtgtagatgggtaaggtgttagtctagaagactaggaacagctgggcatttaacgatgcctgaaggtttctataccgtgggcttattgatggtgatactttctctgccaggacgacatctttccattgaatcctgcctctctccagagtcaggagctgtgagtggggcccgcttccctcggggcttgggctcagtaggtgccaattggaccttgactatgttttggaaggagccctagggcatggccatgatcctgtcctctgggtggccctgcctggcctctggcctgccacccatcagcattgaatcatgttcctaggagaacagcatgtaactaggcttcccaatatagcccctgcctgcaaggtgacaggaagtcattgtcactcgggcactccatcttctgacaccacatggctggcctggctgtctcccttcacttctcagtcctgcacagccatgaattctgctctggggggcctctgtaaagctgggttttcttttagtttttaagtgagccatttccccagtgctgttttcaagcctctgccttgagtctccggcctggactgaattgttcccaccgtctccgcaattataagtttgtcacagtcagaggctggctgaatggaggcagaaatgtggtgtttggttaaattgtaaaattagctacgaaagttaatggagcatttctgcctctgcctttcaaaaggcaggagtcttaggaaggtgcttcaggtaccttgcctaagaaggaaaaggggtgggggtggggtccagccccgcatggtggcacatgcttagaagttgagacagaaggattatcatgagtttgaagctggcttagactgcataatgagtttcaggcttaccaggattgtcttaacaacaaatagagaaagaaagaggggcaggagcttttgcctcaccataccttcataagacctgctttcccgtccatagttcatgttcattttatggatggagccatgcttgttccttgtctcagctttccgagctaccacctctccagctcccaagttcacgtggtaccgcttgcccacttgcaaatgctgaccctcatgctctggaagtcacagtctcagaggtgcgtgcggaagcgctgccaacagtctattttctgcacgcaccaaattcgcaggtcctctaattacaccaaacaaaccgctctgttttcaagcagcaattcgatgtcattttagttgtcaggagcactttaataacgctatgggcttcaccctggacatagtcccccccccacacacaccccttgaaccttttgtatagtgtgaaccagaaactgccagtcatgttttcccccagttggggagatgaacattaattgtgacaggcaatatttttgttttgagaagtgtggcgccttgagccttcagaattttgagcccgaagccggcagtgctggggttgtaatgtaacacctcaattatggtgcagggggccagaaagccagactctgcaaccagcaacgttccttagatccatggctgcagccacaattagggtttcaaaaacaccaaaggcaagccaatgagtgtcatttctaaccggtttgaactttttactactccctaacatcagaagcacccggctagagagctcacttcttgtcctcaataaagcgattaagttgaatgggtgttggggagtttttaggctgagaagggctaaaaatagtcctgctctgttttctgaaagccacagcaggcctggaaaggctggcagccgcaaggtgccaacgaggggttcggaggaagggagagggatggcggcagacccttggggtataaggtccgaggaggttgttgggagtagaggcaaggagatcagctgcctccaaagtgctgtcacaacagcaaagatggcatggttacttctctcttcatttgaagaatcctccaggagagaggggatgaggagagaacatgaaggtattaatcctaaattagattggcagatccaaagtttagaatggattgctaggcctaagtttaacctatttagcacttagcctgagacatcagctgtcctagggaaagggttcagttagggcagtgagtaaatgttctggcctggtatcagagaaggtgggggtgggagaaccctgagagccaagagggggatgctttcaccgaagacttggtgtaccagggatgcccaggaatggaacaaaatgactttttggtaattgacggtcaaccaagacaatcgtgtctgctgtagtcctttgagagtggggtcttttttttaaacgtgagagcccatgtctctcgtttaggaattactgttgtttcttgacagggcattttgctgccatagatgccggaaggagaatgttggatgagagacagcctagcctggacactggggagatggggagatctgggtgttgcttcctggtggcatttctagaggagaagagccatctttggggcttgtagagctcacagtcaagggaccggagcagaatgggcctgcctgagccctggcaagtggctcctctaagtagtgctgtggcgatcacactggagatagtgtctgaagtcttcagaaagactgtgtcatgccaagtgttggaacatgattactacttaaggggaatttaacacacacacacacacacacacacacacacacacacacacacacacagcattgcgagtggcattggagagagatggaaggagtagggtgagaatggaagattctagaaagagaggggtgtgagagaattgtctgtacagagattcccaaagagatcaacaccttgtgagaagacagggcatccttctcggcgagaaaagaggaaactgcctgaaggaagggaggaccagagtgttcctgcaggaggaaggtgtcccacttttggaacataagttcaaacttggtgggagtgtcagggagtagcaatggcacacacaagcttgaaggtttataggataggcagggtcctggtcctgacttgacatctttgaagtagccctggtttccttccttccttccttccttccttccttccttccttccttccttccttccttccttccttccttccttcattccttccttccctccttccctccttccctccttccctccctccttcgttccctccctccttccctcctgggcctgttccatggactcattgtgacccgcggctgtggtggctnnnnnnnnnnnnnnnnnnnnttccttctttccttccttccctccctccttccctccctccttccatcttttttcttttcatcttttacttttttggcaaggtttaactgtatagaccaggctgccctcaaactcacagggatccccctgcctggccctctgagtgcccatacatgactggttttctttttttctactgtcccagaagccttgtgagtttgaccccgggaagcatggtccatgcaagcaggtgtgtttgtgtgctcacacgcatgcatcagaatatcagcctgggaccaagcagtctgagggttcggcagaaggagtgtggtgtttaaggaatgataagaggaggtcagaggctcaggtgtcagacagcatggggaagttggcgccaggagaagtccctctcacttctctgatcctctcacctgaacgtcccaaagtgagctcatcaaggaagatgtgtagagtttgcgtagttttcgtatcccataaaatggccgaaattcccgttgttgtttccctggttctaaaaaagaacctagccaagatggcagtgccaactcccttagataaaactgctcccaacacctgaaagtcctatgcccctggtgctcaggatcagtctccattgtggcctttttagtgcatcctgggccctggctaatgattgctccagcaccagactctggtccctctgttccatcagtccacctgatagatgagaatatttacatcagggagaattccctgccaaacggagcatcccagccctcgctgagtacagccagtcagccttcccagtgctgaggctgtgagcagtcacgttcccttttgtatgcatatcaagctttctttgccatcctaccatcatacctcactcctttcagtttttctcgtaaactttagaactcacagagggagaagcaagtctcacccatgctctaacagcctaggcagcgacagagatccggaatgaattttcttcatagttttgggggatcatcttagttgctcttgagctgttgatttaccatgctgtgtagaagtgtggacttgtctaccctccccagcagtgggatgtgtttacaagagcatcaaggtagggtctcatctactcaagccattcactttcaggaatgggccttcccctcaggatttgaggacacaggggaggcacaaacctaggggctgttattcctcagcttgaggacatgaatctagtttgtcaccactctgtgatgacgacttggacacctactctgcacccaaagaactgtgttcttcacagtttcttatttaaatggttgtatgaaggggaacagtcccctttcaaagggagatctaaggcttcagagtttatacggtgccactgacagtacaaggaacccgacgccaccgcactgtaggacttccctgggcttgaccattagcttcggtccccacaagtatgatgtgtgtggaaggatgtctcacccttcacagcccttagagtaggagtcattcatggggggagtgggttggagaatatagttaggtgagatgctccaaactggcactcttagggaggaggaggaggaagaagagggggaggagttatgtgtgtgtgtgtgtgtgtgtgtgtgtgtgtgtgtgtgtgtgtgtgagagagagagagagagagagagagaaagaaattggtttaccatcagatctggattttctttaaagtaattcaacagtcagtggacttgcatgtaaccttctgggtggctagaagctaatgatgatgttaaaaattgcccatgatgggaacagactggagaggcttcttgtctctgacgtcccagaccctatctgtccttgtaactgttgctttgccctggggtcccgtaggaagcacagtgcttagtgacactttggctgaatgaagaattatcagagtggacgacttctctcctttcttttccttttcactttcctgggttgaaaaaaatgtatcctaactgttaacagtttgtccctggtacacataggaaacagctcagggtgacagctaggaacagtagaatggagacttgagcctagatttctttgattctagaatgcaagtttttaataacattactattcagcttttctctctctctctctctctctctctctctctctctctgtctgtctctctctctctctctgtctctctctctctctctctctctgtctctctctctctctctctctctctgtgtgtgtgtgtgtgtgtgtgtgtgtgtgtgtgtgtgtgtgtgtgtatacaccataaagctagactctgatactaagaactacggcagaagttctttcaaagcctttctggttcaagtgggaagactgtgggacaaggtgctgttcttcctatgggacctgagacagagactccaggattcctgcaaaatctgaggacactgcaccatgctgcccctccagctgcagtagagcattagttgggcattgtcctctcagatctagcagtgccttggtgttgtccccaacccaccccaaggtttcaccttatgcagagtggaccctgagctgtacacagagtaccagcattttcccaactcaacagctggatctacacatggccacccttaacccacagaacacccaccataccctaacaaacatttggctttctgcaccctcccttagatttgagaccttgcatccctggcctctctaactcctgttctacagtgagtatagccagtgtccccactgcagtgccaactgtagcactatagagccacatcctggaccaccctgagccccgtgggcttccactcagtgccatctgcccacctgtttccccctttctatcccgtgtcccttacaaaaactgatccttcccagttttttactttgttgataaaggagaaagcgagagctagggagagccaaagcgggtgtgaggctgcaggcagctctctctgggagtacacagctccttgagggaaggaacacgcagtgctggcctttggaactggcagccagtgtgctgttctctgtctgataagaggtactgtaaataaaactgtacaccgtggcctgttgtaaaatgcccgagtctgtacgcattgttctggcggcttaggctttttttgggtctgctgttttggtacactctgtacttccttatgtaagcaggcatgcatatctcatcagaacattcaagatgtttattttaaaattgagaggaattaaaaaaaaaaaaaaggacacactactcaacatcagatgctggcaaggcgctaggtgtccccacccccatcctctcagtggttcctttttcaaagattattattagcttgggggttgggaggctttgaagagggaggggtttttgaatttgtttctttttttttggcttcagccttgcttccctagagagacatcccgctgcatctgaatgcgtgcagtatcttttactgatttctagatacccaggattctaacccctactcccagacccatttctggttaagaagatgagggagaagattctatactttgccaaaaagattaggccagaggaggaggccactatggggagtgtcgtggctttcactgggcctccctcacctctgctgcccttggagtactgacatttagataaagctttatgtttttgctaatgcctctgactggccttgatttgatttcctgtgatcctgaaatgtgggggaggggggtggttcaggttggaattgtccccctttcccttggcagaaaccttagagtagctccagcctcactcaggctgttgtgtctacatcttttcttctcaccaaacctttacctgattttacgtccacctgtggcttctgtctaacctgggtggtaccaggatgtcagggcacagaagagaaaagcgactatggaaaaccctggctattgaggcaactctacttcagtgtgatactgagagctttgggtatttggagtggggggtgggaatcttgcaggagctaatatatctgtttgtctatctctaactatcaggcttactaacccccagctaaacttagaggtgagggcgtcccccaaagcagatcactgccagccagtgagtgtccatcctggtttgctgagggaagtctgcctggggatgggaatatactgaagggaaagggcttgctgttgtgaggtatacagtaggccaagaggaaatgggagccctgcttgtctaaccttttcttcttttcctctgagcttcttgagtccctgccagaaacagtcatgtcctagcgtttctacaaagaatctgtagagaacccagaaggtagagtcagaactttgccaccctccaggtaacagcctggcagtggtctcaatgcccacagtctccttcccaggccagttgtataccccagtctaccccaatagagcttctagtgtgctggggagggcaggagagaaacgagaagcagacccattgcaggcggctatatggactcatccctggaagatttcagagttgaataactgatttgttgttgatgctgaagtattggtcctatgacagatttttctgttcctctcaaaacagtcactcccttttaaatcaacagtgtgtgtgtgtgtgagagagagaactttgatatacgcctttacaaacgtgagactcaccttatacaaaataaatggccctcaaataccattgcattgaatctcagtaaaatcaatcatagtttaattgcaacaaaggcagtacttgaaagggatgctgggtggtgatgtgtatgggtcctctgtctctacaatccactcgactcacttgtgagcttgctgagggacctgctcttccgatcccattttacagatggcatggcatgctcacggttagctccccttgtgtcatagctgctgaattcctctgccaaatttgaaatactctgtcagacccagcttcgaatccctttaccataacacagccaccatgggcagcattaataacacctgtggtctctaagcaacaaggagtcttgtttttgttaatatttggcatctgcctcaaagaaacaacgggtcagcgagatggggcgctgcctaaaggaacttgtcaccaaacctgaggacctcagtccaatccctgggacccacacagtgaaaggagagacctgacctccacattccttccatagcatgcattaccccacactaataagttaaaatgtaatttgagaaaagtaaagagaattaggtagatagggtcaaacccatttcatagccagggagccataggctcagtaaggcgggaagacttgagtctccgggtgacatccagagcatcaggtgtctgattcaggcctgggccctggctctccttgcttcactgtgtttgacagaaacaattggatgggtccagctccccattcttcctgttgctgcccctcttcaagcatctctttctcacctctgcctgacattcctctcacagacccccacctctatccggcctgatctcctggttctttccctgccaacagacaaatggccttgtttcttcctgcttcctctcttctacttacctcacaaagatgccaactcctctgaggctgctgctacagcctccctaaaacatgagctctaccctttgtccctccccacccagcttggctctgtatcacatactactacctggcttgtattcttttctttcttttaaactgcgtttgcatcttggtcacaagctctgggaggacattgtcacccacctcctggctttatggatgggtacccatgaaacagcctcatgtgggaaggatgtgacagccatgaccattttggagctgtgaccctggagttcttttggctctgggctgagccccagggcattttatatggctagatgttgctgctaggcccatatgcactcaccctggtttggctggcatggccagttttgacaccccatcctccaacttcccattgatgctttctaaatgtatcagagctagatgatgccactgtagtgcatttcaggaatggccgtgtggtttatccacatttgagttgctttaaatgcaaacctgacatcataccgaaggcagcagtgaacaacatatgcacagtaaacaggcagagactgtcttattgattaacagatgaggcctctattatcgatctaggcttggcgaggaaatttatcacttttaatttcagggctgccaaatatttctgcctctgagccagccattagagagacaatttaatgtacagcctacttgggagaggggaattcatctgatgcgttctgccctggtctcagatcctcaccctggagagcctggggtgcaagtgtctccaggaggggagccagcagtgggagccatcgtctgtggtcccaagtggaacttgaaggctgacttggagtcccttgggaagagcttaatatcgtgactttggtgagtgcggagtgagggggacattgaaggccactggatatggtcaggctgggaccgaggaagtagtcatttcgtagatgctgcggtgtgcttgtctgttttttatcttcatctgaaccccgggtgatagtgtatgttcgcccttcgtttcctccctcccccttcctctctctgtgcatctgccatgaaagtgagatgctccctacagccccattgatagcggtttctcagaacctcgccatgccacatccctttgaagctcacagcactattgggttcctaactcgattctgattatgactacggggctccaaagcagtggcggagcccacgaggtgcccacccctcccattctttcttcagggagcggtgagaacagagagccaaagagaatcagatccctcgcaaatccacagaaaaatcattgatggctaatgattcaggataaggggaagttgnnnnnnnnnnnnnnnnnnnngaactccatccaaccccagcccccccatcctgaccctctccgctttttgaagcatttcctgtgtaccccccccaacccctgtacatggatgaaagtggtcttggctgtcacttccaaacacacagacactgtttttgccaccgtcctcatagacgttttcttggcttgattttcaaagctctgtaagccatgggccaggtgcttggcctgaggatatcctgtggctttcagggacactccaaggttgttgtcacaggcttcctcctgcctccaggtaaaactcagcaccagtcacctgaggcacgcaactataatgactctgaagtcccttcaggaccatcgtatcagccctggagtgctttcacacccgttatccccgtcagctcttgtgctgagcacgtacttagggtacatatagcctgtttgttacttgggaatagagaagtcagtgaggctgggatcgtccttgttctacaggtctctactcatcattgacaagaactgttctttggtgtttaagtctctgtattttgattcttactttttaaggcacagatttttcaatttattcttttgacacaaaattctttctctgtagcccaggatgacctggaactcaccatgtggcccaggctgatcttgaacttgcaatcccttctgcttcattttcctgagtgctaaccttacaagtcagacatgtccaatcatcctcgaatttttaaaacaagtactggaacgatttctccaagtgcagtttaacatgaaaccctgatacataacatgggtaacgggatatggttttgttgagttgttacacgggaatgaggcacttgcccagttatccataagtcttctttgcagatagaagcccgaagaggctgacaataaggaggatgaagagttcagaagtcaggctgtggatctgtgtcctccttcgctctgtgttacaaccggcatatccctaacctctctgagtttgtggttattcatctgctgagtaggacacagtagtggtgtagacgccaaatgctgtcgttaggacttgacgtagtcaatgcatagtctgcattcagcatcatgcctggtatatagtaaatccatgagaaatcctgagacagagaagagcagtggggactgcaaatgtgcaaaaaatattgtccggctcttacaaggctataaggtatgcttggacacttactaagacccttgaacacacataaggaagagctcagatactttgcgaggtacagagtggatcggaagggatggaacagctgtaactggagggtgtgcccctgatgcatggtcttgaacatgaaatggcattgaataaacagtagtgagaccagaatagagacactagcggagtcaggagtcgtctaaaaacggtgctaatggacagtctaagggaccatctggctgtggcattgtttggctcactgggtcaggttatggaggaccctgaggtaaaaatgaagaaattgagaaccagtacaaatgggaagtttcttatataaagaagtatgaggagttatataaccttcaatggagaatcggaccatgtaaacccaaccttgagtcttccagtgtctttgaatctttcaggcacgatactgcaaaggtctggataggtgagggtgatccccacacagtggagcgatgcatattgaagacattttgaagaaaaagccccaagacttcaggctggtgacccttagatggcatgcagaaaacgactgggctagtggtgtcatgtttcacgctgacatggtgacaccattgctgtgagctttgtaaatatggctcttgcttggctctaagaacattgatggagtttaggttgtcataggctcccaccatgagtcaggcagatacatctgtagacaagatgataatggcttctcagagagtcaggctcacagggtaacagatgagtcaccttgcccagccctgaaagccgaagcttcagtgatggctggagtggagtgttaaggtctaagggatgcagggatgcagggaggcatggcagaacgggtgctagtgtggaggaagacaggcccttcagggagtcacctcacttgaggtgggagatgaagcatggaagagaatgccagcaagggctggtgtgtcctagggaggagtttgggcaccatcctcaaaatgcagggaaaatttacagggcgttaagtggccaggtgcaagtggtagttagtgggtcacagatgagttaaatttgcttgtactgagtcagagggtgtggagacagaggtaatgcatactgccttgtgagatacatgtctctccttgttggtgtcttttgttcccatccagcagagctggcctttcatcgtcatggggcctcttacctagactctgtcttagttcatcttagtcatgctggttttatttctccttctctgggagacctgggtgggtagtcacctgtccaaggtagtctgcactagctactggggctatggattatctctgagtccgaatcttcaccggtgtcccgggtgttcccctagtactcaggacatgccccaccctctggactatggttctaacgttaccatttctttctttcagcgggtgccaaagcctttgtgtgtgatcaatgcggtgcccagttctcaaaggaggatgccctggagacacacagacagacccatactggtgagtgtccctgactccattccccagaccaccaagtattatagcccaaaggaggtcaaggtatttggtgacatcctcttactgccgaacacggtactatcatgccgagcgtctctgtggatgggaatgggcttgtgtagacgcccgtccatgaggcttgagcaagcattacagataggacagttctgagaccagctgttctgagttaggccaagacactgtctgtcataagtcaacgagcttccatcttcccacagtgtcttgcacgttcttgctgaggttctaaggattctgtggtgttgcctaagttcccctcgctagtggtcggaagcctcttcatactcaactctggttaaattcagaagccctggtgtagccacagtggctgacccgccctctctaacaggttgagccgtcatctctaacacagccatcaacacgcagggatgtatttgggctgcgttaaccgccacagtgctgattgcagtgtcagcatcatctcgtcaccatgatttgacagctctgttgccatcgtggccaaagttcacactggttggttgctcacgctgtgccaggcactgttctcctttctttccatgatccctcttggccagtctctcaggactcctgcagactaacagggaggctactcttaggtcagaactgaagaaagggacttttttttttttttttttgagacagggtttcaaaatccgcctgcctctgcctcctgagtgctgggattaaaggcgtgcttcaccatgcttggctagaaagggactcttaaaagaggtcagggacttgccgaagtcagaagcaggagtgtgatcgttcagaggttggggtacccaggtttcattctgactggggcagttcctaaatggaaccggggattcattacttagtctctcttcatttgggtttcctcatcgattaggaaagcaggggcatgatgctatgggtctatcagatagtgctttgtgttgattcagtaaaattattttacctgcagtgctccccagagtgtttgactcctagtaggtatttagtggatagtagttgatggatacttaatcaagtactttttgcaatcccacagtgtgtccagactgctggtggaatttaggatatggtagcacacgagacgcaggcaattctgactctcagggaactgaggtggctgctgagacatagtatggaggacaagcatatgatacgatgtcaattcaagtgggtgtcgccaagaaaaaaatagagcagatgtgcgggagaaaacgagagggagaaaagtggtggtttggataaaatggtcagggaagaaagcttctttaaggggtgacccttgatcagaaatccaaggtgaggggcgaactgcttagactcccgtgggagcagagggacttgcacttggaaaggtctggaggccaggcaggggctcataatttcagaagagcagagtgaagaacggtgagcagagtgtccagtgagatgggaaatggggccggcctctccgccctagagcctgggctttactctgtatgtgctgggaattctcctgagcggtgtgttagttactcgtttcattttagcactgtgactgtgtacttgagaaaagcggcagaagaacagagagtttattttgactcactgtctgaggttacaagtctatcatgtccctcttcagttaaccctcgttggaaacagcttcccagaccggcccagcaatgtgtctcccaggcgattgcaaattcaggcatgttgacactgaagattaacgatcatgagtcaagggaaaatatttgcaaatcacatgtgaaatctatagctaggaaatacaaaagagatcttacaagctgaaaacccaatacaaataaccagagaagaaaataggtaaagggaatgtcacataactccaaagatagacgtagccgaaggacacataaaaagattctccgtgtcattagccaccagagagatgcagatcaaaccgcagtgagataccactcagcccatcaggatgtggctctccgaaaagacagagatagtggcaagtgttgctgagggtgtggaaaaaccagagtccttgtatgtcactggtgggaggggagagcgaggcctcgtcgatttggaggaacacctggacgctcttaagaggtttaaacatagaatcaccagattacacagcagttttgctccttcctgtctaccaaaagagatgaaaatgtgtgtccatgcagaaacttgaatgtgaatgtccatagcttcagtcaagtagaataagctagtgtcaatcaattaacaggtcagtaaaacgtgaggtatacacggtcaatgaatccgttttcgttgtgaaatggatggaggtattgatacacgctacagtgtgtctaaacctgaaaaacatctgttggaagaagcctgacacaaaaaagtccatgtgttctatggtggccttcattcatatgtaatgtccaggatggataaacctgtacagccctggagtacattagtaggagtcagagagcgcaggtgtcaggaataaataggggctgactgctaagggatacacagtttcttttgggggagacaaacattttctagaattgatcgtggtgatgactatgcagtgtgtgaagatctggtaaactgcatcctttgcaagcatagatatgcatgctatgctgcatgccatgtgtattgtagcttttaaagctgggtgaatgtgtatgtgtgtacatatgtaatctgtcattgtcagaaacacttgactggtggtccgtatatgccacctcatgtattctctctctctctctctctctctctctctctctctctctctctctctctctccctctctttccctnnnnnnnnnnnnnnnnnnnntcaagtagaataagctagtgtcaatcaattaacaggtcagtaaaacgtgaggtatacacggtcaatgaatccgttttcgttgcgaaatggatggaggtattgatacacgctacagtgtgtctaaacctgaaaaacatctgttggaagaagcctgacacaaaaaagtccatgtgttctatggtggccttcattcatatgtaatgtccaggatggataaacctgtacagccctggagtacattagtaggagtcagagagcacagatgtcaggaataaataggggctgactgctaagggatacacagtttcttttgggggagacaaacattttctagaattgatcgtggtgatgactatgcagtgtgtgaagatccggtaaactgcatcctttgcaagcatagatatgcatgctatgctgcatgccatgtgtattgtagcttttaaagctgggtgaatgtgtatgtgtgtacatatgtaatctgtcattgtcagaaacacttgactggtggtccgtatatgccacctcatgtattctctctctctctcccccccctctctctctctcacacacacacacacacacacacatggatatgtaagtctgggtagatatataaacagaagcttgtatagagaaagaggaagatagtccagtgagggatcttagggcgatctctggagattaaatctagggcctcatgcttgctatgcatacagcccaccactgagctgcatccccaagctgcactggagaatttcgagtgtcggtgacttgatttatacgtgtggaagagcactgtagaccttgtgttgggaattgatcagagagaatgttccaggagctagttgctgtgtgagccaccactccagcagacccttagaaaaaccaagtgttctgagagttggttgggctcaactgggtggttttcatatagagtgccattaggtgatggctggggctggcaccttctcaacagggccctggggcgtgtatcatggtgatctctctgcccacacatcttacttagaactccagcttggcctgtcggcagcagagcagcctctgcctgtttctacagaacaccacctccggctacagaaatcagggaacgagtgataccagctccgttacaaccgcgaaaacaaccagagacacagtctcacctctgctctgtaccgctgttttaaattgtcccaggtcagccccacatttagaggaatagaaatctagacttccctggaacattctctctgatctcactgggcgagtggtaagcacctataggtaataaagagaattggtggcagccatcttgcagacaagcaaccacaagtctggaggggacaaagggagactatgttggattctggtaccgttttcttattgttagaccacacacactgaggaatcccactccaggaatgctggccgggggtaactgagaggaattttgagccctctttgtcatgtacctttgctttgtccatctggactgaattcacagcagcaggaagcagccttccttctaaaccagaggttggggaagcatcagtgtagttacgctcagccatgcccaggggctctctgctgaccttccgtgtctttggcacatgtctgggaggtagtaacattatggccatgtaacatggtagtaacactggggacccaagggtggttagggaagtttacttcctctcagataccttgtggctttctgccagtagaggggctccatctgaggtaagtcagctcatgtggagattaagcgatagatatttagtagacttcgtgtggctctctcagtcaagactgagaagactaagggtgaagggtggagaagttggagtgagagaggccaaggttgaagctgggtatagggtgtgcgcaaagctaagagcgtcagctacctactagtacagaacaggcactcggtgaggagcctaggcactcagcctccccttaatgcacggcagggctcccttatcatgaatggtaggcacttcctgctgatccttgtagtacccctcaggctgcccttactgtcaatgaaagaacatgtgaactcccatctaacatctctgttttagaaaaggggtctcaggaaccagctcagttggctgagtgcttaccagcagcatgaattcctgggttccatgcccacccaacactgcatacacggggcatggggggagggtatatgcctgtatggaagcagatggaccaggagttcaaagtcattttcagctatatattgaatttgagggcagcctgggggcatatgagcccaccaccaccaccaccacacacacacacacacacacacacacacacacacacacacacacacacacacggggcggggggcagggacagcctaggagaggggttccaagggaatattgaaaataatactgaccagtacggtgatgcacagctttatcccacccagcacttggaaggcaaaggcagatagatctctccgagttcaaggccagcctggtctacatagcaagctccaggaaaccttgactcagacacacacacacacacacacacacacacacacacacactcacacacagagagagacagagacagacagacagacagacacaggaaggaaggaaggaaggaaggaaggaaggaaggaaggaaggaaggaaaagaaaaagaaaaagaaaaagaaaataagactataaagccacaggagccgggtgggggtggtgcacgcctttaatcccagcactcaggaggcagaggcaggcggatttctgagttcaaggccagcctggtctacagagtgagttccaggatagacagggctatacagagaaaccctgtctcaaaaaaccaaaaaaaaaaaaaaaaaaaaaaaaaaaaagccacaggaagtatcaaaagtatcaggccaagtgaggtggcaggtgtcaccagagagctaacagaacagacgagcagtctggaggaaagcaacagagactgtggggagagaaggctctgccgctgatgacttgacaaactgcctcagcagaccagttttacagataagaaaatggaggcctcgaactaggtaccgagcaggaagtccagagctgaaacctgacccagctccaagttcagtgcccttccatagctcctcagcaaccggtgccatgctcctgggtctgtgaacctgtggcctgagcaggtcagggagagcctgtgctgccgctgtttctctcgtggccctgtcctggccatcctcgtgacccacttaacttaagaattcccagtgctctgatgcccacagcttcatgtcaggataggatacaatttccctgattcaggttggcctgggcattccctgaccacgggctccacatgaggagggatcagccaacacaggatagataccacacaggataggaggtacagtgtctggaagattattatcgagcccctgaacgtagtagaagctggctgtcgttccagtgcaagctgagcagatggtcccatcacctctcccccttctgactccacttagcctggatttcttcttttcctggtgtgcatgccgccctcttccccccagatctccatgggctcaggctgccgcttcagggagaccatccttaaggcgggggctgggctcgggctttgttgtcacatcctggctttctgtttgggtacagcaaagactttgaggaggataaacagagatcattttacaccttttatattatgacagatacatactgcaaaacactgctgcttccaaaatgtttgggttgcaggaattaaccgctaggcagttcccaggaggctcatacttcatttacacatcagaagtttttttttttccgtttttttctttttttacccttttcagtcaaaccagagtgagaagacacgtgcatgtgtgtgcacagtcatatgcacagccaaggcatctcctgggttcagtagcaggagcgtcttaatttagtaagtagttctttaagtccagataaactgataaataccattaatggcttaatttatactctgggtttgaaatttgacactcggacactatcttggctcgggaaacagaagtggtcttgtgcccgaggttttaatgaccgatcagtaatataaattgctacatcactgagcagaaatagcctctccttgtcatttgatctggaaacttctccggccaggcagcagttaataaatttaaaaataattaccctctttattcaaagtcaaactaattaggagtggtttttttttacaaatcataatgttgttcaagtcactgtatgttccctctggagacttgaacaggcctagggacaacagactgtactggatggcggtaatgagagagcaggagtgtcctggctgctgggctcaagggggagtggccggggcagtctttatcatgtcccagggagaaggcaggcactcgcagggaggaggctgggaagattcacgtgtaggaaccttcaattccggcgtccatacagaaatctgagctactgtggtgtgaatatgggggagttagggtcaaggctggtctgtatgggaaccaggctgagagacaagagtcaaggagcagaaggagtgggcataccggtgcatgaccgttacaggagactcaacacactaaaggcagatggatgggtggaatgacatctgaaaaaaaaattgcttctttgccaagtgtgggtcctagtggtttagctttatgtcatacactatagagagaagttgcgcgcgcagccttaagtcttaggtgtagagtatggggtaccacggcatggtggtccaggacttggtctctagtgtcacacaatagctttgtcctttataaagtttatcatcttggttggattattcatcttctttaaatcacattttgctcagccacggtatcaggaccatgtgatgcttggtttgtttggggtaccacggaagcgctcagcatggaccttgcatagagcatgcattcaggaaatggtggttattgttactgcatcatccaagtcttattagagatgaagagcctcatccccttactaggtaggtggtaagaggaagggccatgcccgtagtgatnnnnnnnnnnnnnnnnnnnncccgtagtgatgatgataggggaactaactaactgttcccctatcatccagctgctttttcaaattggaggtgtaggaacttctgggatcgtacctatgccctccagccaagagatcgtctcctgtgtgtctgccatgaggaaatagtagaaccttctagtctcctttgccctaaaaccaggaaacatcctttgagcaagtgtcctccagtgcccactctttaagtgtgcttgagaggagtaagggcatcatcctaccccttcctcaaaatggaagagagaaagaggcaggcaaatgatgagtaaggccatttctgggattcgcctccccctaatatagggaactaggttcaactaaaccatgaacttgccccggagaagtctttaagtctctcctcctgctataaccttgctccagaagatctccaagttaacagtctcattttctgtcaatcagaagaggttgtccagctcggttgtccatcattcctttgttcgcttgctctctgagttttagagcattatacccagggaatagcaggtgctttgtggctataactcataatggtgactaaaatttggttcctaccttcctgatgaaggccatagtgctggaaagacacgagcaaggaagctgagcttggccttaggtatggatactagaagagatggccttgatagctctagctgtgttaactcctcatgactaaggtagatattatttctctctcatctttggtggagaacactgagatcttgggggttagggaacaccagtccaagacagacctctaatgagtggtgtcttgtggttctgtgtcccagaatcccttctttaagtgatgtcctcttcctgtggggcctggcattgaatctaaccagaggcttaaagcccatgcttggaaaaggtacccagttaagaaccctccgctcaaaaagatccaaactagaattaggtcggactcgtatgacatttcattttcagctcaagcttctgctcttctcccaacccccacccctgactacaaaatacagactttctttgactggcctagaaaacaaaatgtttagtttctatattgccatgtgacaggggaagccacttaaacaaactcaagtgcttagatgctacttttcatggacctaaaactggcttcaagcaggtctctcaagccagaagccgtggacacacccggcagtggaggctttgctgtggactctgcctttccctttcaacagggagtgggcgttgatggacactcactcaaaggacccttcctgctttaggggaaaagcagactagaaggttctatcacttttctcattgttatgtccaaaagaatccctaacaagaaggaccttcatggcagggttctgactcacagtttgagggctgacagtccttggcggtggagaaagcatggcagcaggtagctctctgggaacaggagtgtgcagctaggactccttacttcctgacaccttagtaaaataggaagtagaaatacgggaaagaggtattcacctgtttttcacccttcccttctggcttttccagtttgaaactccagcccagagagtgtcactacccactttcagggtggatcttccttcttgagttggtcttcttgagaaatgccatcaaagacatacccagaggtatctcaagttatctcaaggccactcaagttgaccattgagattaaccatcccagaagaatacacataaccagcagctgattggctcctgggataaggcaaacggtgtttccagctctgatgttggcatcctgcctttcctggcccgtgtctcacctttgatatgtcagtgacactttaaaaaaaaaaagattggggcgtgcccttgactctgatcttcaggtggcaaagagagcccttgtttgaagggctcctcatggaggctggctgtgggaagaatgcaggaaggtagcaggtaaagtcggaggtttaaaggggaaacactaccatgcctcctcgggatccctgccagccagccttgccctagacctagctttagaagggcatgctggacacctagaagccatgtcaggcggatgggatccaggcctcaagcactgtctccgcctcccaaagcccaaccccagagcagacaggagagcgaagaggaggtagatgatcagaaaaaaccttgatctccctgatactttacatgaaacaaaaaaaaaaaaaaaaaaagaggaaggaccaagcctcaggctcctgcccaaagtgtaaggtacgggggagggtaggacagtgtgagtcatcagccggacagacagactccgtgctggttggcaggttctcacccttgaaagcataatagcgtttgacttttataaatatcagaggtgattcgtatagcgtttcacatggtgtgccaaggaatttaacacgaggaagctcaaatcccagaatggccacagaacgtcataggcacttggggagggggggggggggccggggtcatgtgctgccgcttgtacagtcagtgcccagcatagatttactcttgacctaatttcatgctgttactataaaggcatgcttgatgcctaatatagagttttattttccaagcacagatctctcagctctgcggaagctgcctgctgtagatcggggaggggccacccagctgtcacttgctggtctatacaaactgcctgctcccctgcctgcccccagggtccctccagccaacttctggaggtttccctccatggtgattttttttttaagctggcattaatggtcatctttagagcagttttcggcttgaagcaaaatgtcctaaaaggaatagagacttctgagagtgcccgtgtccccttgcatgcagagcctccactgctgttggtgtcctacggcgccacggctcatttgttaaccctgtggacccgaaaggactgagcatgccagtctgaggcccacagctgacatgcagctcagtcttggtgagcatagagcagcgtataatgacacaggtccaccatacggatcagtttcgctacctgaaagtgcttttgttccctcacccccccacccccgccctcccgcttcatctccccaatacctttaaagagttattttggattatgtgcgtgtgggtattctgggggatctgacacgtattctggcttcctcagacacctgtacttatatgtaaaaggcaaacgtgggtcctgggacctgagcttgggtctgctgcggaagcagcacatgttcttaactgctttgacaattctctagccccacacccaataccgttgcccccgtttttgattgtaaaagattgtatatgtgactctggagggggaacctgcctacggccttgtgcatgctaagcaagcgctctatcactgaactatacccccccccaaccctggcgctgggggctaaaactgataggcttgtgaagcaattacttctacctgacaacctcagtatttctttttttctccttcccttttctccccctcccttggttccctccctcattaagcccacactggtctcaaactctctatgttaactgaggctggccttcaacttctgatccctcctgcctgcacctcccaagtactaacattgccggtatacagctccattcccacactagtcacatgaagaggttactgccttgggcagtgtttgggcaaatcactggtctttgatggtctggagatgggtaaaaagatgccacccaagacaggctagagacgactcatcaccttgaacatccacatcatagcagacattctgttgggaccctgaggtaggggaggagttgtgggcaggacccacacgggcctcattgctctgcatctcctaccatggcaagaatgatgttggacactgctgttgacagaggaggagacagtgtggtacttgaaagggtcaatatcacaggaaaaaggagaacaaggctttttttttttaatcatcccatttccaccacaaatgtgctttatgacacagaaaaaaaaagcttcatttttttttctaactctcacatgtatagggtgggaactggacaagaaaaattgctgtttagggactgtgtgatccagggaagaatctaagatctgatcttgtattgacattgttgtgaattcttctcagctagtcttcatattcagcaactttgtttagaaatacggaggcagcagtgaggggcgtagcccagtttgtagagtttctggcatgcacaaagcctccctccggtccagttcccaacattgcataaattgtgcatagtagtgcatgcctatagtcccagcactcagctagtggaagcagaaagatcagaagttcaaggtcaccttctgtgatatggtgtttgggactagcctgggctacatgggcatatccatatatacttatatacatattatatacatatttagggatgcaagtatctgaggaagccagactatgtgtcagatcccctggaactaaaattcaaggcagatgtggctgctgggaactgaacttgtctctttcaagtaccacactgcctccccctctgctaacaatactgtcgaacatcattcttgccatggtaggaggtgaaagacaatgaggcccatgtgggtcctgtcctctgttcttccccctaccccagagccccaacagaatgcctggcaggaagtggatgttcaagatgatgagtcaggaagcttgcgtcttctctaatctgtcttgcgtcaagtgtttttacatacatacatacatacatacatacatacatacatacgcacgtgtgcgcacacacacacctgttgtaaacaatacaacagtatctggaaaatggtcaggactcctagggaacagcgtgtgtcttagtggtggtgactgcttttactctggatacgcagcttcttttcctcaactgtagatggtgtttcttttgctttctttattcaaagctctatagctttgcattcagtgcatactgtttccgctctaggagccaaaggggaagagaagtgtttgcccctctgtgaggtcttaggttgccttcagctagtgtgcatgacggtgggggtgggggtgagggtgggtgggcagtcataggtcctgagaagtttaaatgatgtgactgatcatatggtagaactacatgcaggtggcaccccaacagtggacaaaattgtactggagacttcccatgtctttcttgcccagagtttccattcagattggcccaccatcagcgtccctgtggccagccttattctccctacaggtctcctctgtctctcccccattcctctctctgctctctctctctttccttcccagcaccctcccctctctccagggctgaccctgctgcctgctgacagaaaggagttagtaaaaacctatgtgtaactgaaatctgaaaagccataaatcgccttgttttttctagaatgttggtagcattttgatttaatagttggacaaacacaagggcctattttattcagagtttacaggcctcaaggctgttattcctccaaatttaatagcatcgaaattgcagggttcgctataatttgcctatcgcttgctgctccgccattgatgtttattgtcagcgagatggaatctcaatccgactcacttagataacatgtctgttaaacatttagataattgtacaatcattaacttgtcacattattttagagattcaaaacagaggcagggtaagtagaggtacccaaggggggtggaggtgggtggtggaggaggaggggggaacctctttggagttagataactggagatgagagaattgattgcaagagctgctgcatcatccaagatgtctgagttatggaggtgtgtgctgcagagataggactatgggtttttttttccttctttcaggttgccttcttaatcatcccacactaccatggtagtcaggctgctgtttgctggcctctgggacaaggtgccagatgctcagaaatctcccgtgctctgtccccaactttgtctaggaaatctgaatgtgaggtgacttgtaactgtaaagcattatgaatgaactaaatggccatagaatctgtgaactgaggtacctggcctggaagaatgtctgtgatgttttgagggcttttttaaaaagccgattttaaagtaaattttaaagaggacctggggggaaggatggttcagtgtgtaacgtgcatgctgcaggagcatgagagagccccgagttcggggattctaaacactcacatatcaacctgggttcatacaaacagaagccagcctgtaatagtctgcgatgctctattgatattaacagaaactatttttagaaagaggattagagggtactttacttcctgtttttctatgttttagtaattattgtgattaaacatttgccacttgtataacgctaaaaccctaatgtcactttataaattaggaaaccttcatggttacatctcattcctcccatggagggagagcgatcaaggatattcaccgccctgtcaccttgacaggtgcctcagttcctctactgtgaagacaggcaggtgccaaacggggaccccagcaacctggcataggcctgtgccagtctctggaggtcagggactatgggaacaatcacagtaacaatagtaggctggtgagagctaggaatgtagacgtgctcctcagaaatgagcagtatacacattcttgtctgagagggtcccggtacaggggagatgcgactgtaggtctgtcttgctttggttagacagttatgccctgcatccccagagtatacactatgactgggacaagagcagcactgccatttccagcttacgtgtccccagatgacatagaaaagttggggaaaacacaagtttagcaaaataaaacaaaaaacaaaacaaccccccccccagcttagtatttccccaaccatattgtagataatgcaggtactggggggtaagaggataaacaatataaatatcttataggttgtaagctaaataatgcatatatttagaagaacaacgtaaatatttcataggttgtagtatagattcttgccaaaatgatagaactggctgctgaggccagcgggttgagggtgagggtctatgaggccggaatggagggcagcagggtgagataaaagggagcccggcacttggtagaagaagttagccaactgtcactagccaggaacccaagcatgccgggagctttgatttctcctcaacacataataccattcgtttctaatgtggaagagaagccaatgatggaataaaacaataatgaggacttcttttctaagatttacgttgtgtgtgtttatgtgtgaatgccacatgtatgctgtgttcctgtggaaccccaaagaggtcagtggaactgctggaccgagctcctaacacagggactacaaccagactctgggcttccagaagagcaaacatactgttaactgctgagccatccctcccatctctaagaatttattctcaaaaaaagcaatttcaaccaaagagaattgaaaagcatgcactcattcaaacacttatgagagattcttcatagcagccgccgccatgtggtccagaggtgggaactacccaactcttcatcaactgatgaatggataaatacattatggtatatccacaaagtagaatattactcacccataaaaagtgaaacactcatacatcctatgcaaaagaggtctaaatgcaagaatgcagaagtaaaaggctttatgttgtgagatccaatttatttgaactgtgcagaatagggaaggtggcagagagaataggttactgatggccggggggtggagaggaggcagagaggtggtttattactaaatggctgtgagttttctttgagaggggatgggcacactctggaattagtgatggtgatggcttttggctttgctgaacttattaagaaccattaatagggcaaactttttacatctcaactgagggcaagtggttttaagtttgtgaatcacataagaactaaagtaaaagtaattttcaagagtgagtgtgtgtgtgtgtgtgtgtgtgtgtgtgtgtgttatttttttaaaacagacagcttaatctcacatccctgatgtatcacataagtgtctgcacaggtagcactttgcattcagtgacccttaggaaaaaccggaggctgtggccattctatttgggagatcaagatggtttagaggtgcctctttgctgcctccattcctctttcttcaaggataagaaggaagacatgcctttgtactggtacaatgtccacaaagtgagaagactgggcagttgtgtgttgggcggatctggagcagaaaagccagcccacagctggccttggaggagtcatttataaaggataggacaggacaggattggctcagcagcttatacagagaatgagtcccatcgatgatgggagaaggtttagtgtgggagaaatcagaaaacaaaggaatatgccccgagtccctcatgcaagcacgctgttttgtacccaacttgtggcttgatggccactttaatggctttcctatattcaccctggccattcattctcttctgtaagcccagtgagccttacatgggcagtgtggaccagattcccctgtaaatgctgtttctggaatggtggaagcagtaggcagcagacccggctattacctcttacctatctctgctgctgtcaacaagacaaagctcgggaagccagacagtgctgcggccgctgcacgggccgttccaggcaggctcaggatgctgggaacgaacgcatctcatcctcaccttcaatcttccttctagctgtttccttctgttttcttcagccttgcaaatggccactggccctgggcagggtttaggcaagtaatttatgtcttctcctcacttaacaaatgaccctgcctcaaggttgggcaaacagaggaaaaatccaagcatcaatttatttttgccaggctaaaatctgtagttaaatagcaaaattaggcatctccatacatactcaagtacagctaggggagattttatagagctgatgaactccaggcaggtggtaaggggcggcggggtgcggggtgcggggtgtgtgtgtctcgaaaggcttttgttttagaatgttttcttgtgagcattaggaaaagttacctcacaaagagattgcgggtttgggtcagatgaaatgtttcctgcccctaccaggagaagatccattacagattggaaatgactttgtctctaagagcccgttgtcagatgggctatgccttcccttcagccaaacaaatataaaatgcttccagcctctgcctcgattttctattactgtttcacgggactccagagagttttaagatagcaatttgattaagcttacggggaagattctatcagataacattcttcttccgcaggtggagggaatgcgtttgagtattaagtatgttttaaaggtaattatcttttccatattcattttagttacaggaattgaaaagggggagacctcgcgtctgtaagttgccccttgggccccggagtctctgtgacttctctctggggagcacagtgaaatgtttttgacaaatgaataggcaccgagttgttcggaatttgaaatgactcagagggtccctgcctccagagcgctggtcttaaaggtaagggaccctgtcttacctcccagcttacattccttgttctggagcacccctggatgtctagagggggcttggctggtcctcagaaagacaactagtctcattcaaggacatgatggtgctgccggcctgaaattagcatgtatgtatacctgaagttaatatgtgtacacacctgaaattaacatgtcccaactttagagtgtactcaactgagagatgtcagaggttctaggagtcaaaaatctatacatgcctaaatcatagaatgggagcatgggatcttagagaatgtgcctctgtgcctcacagatattctgtgatttttttcccatgatgccacagcaagtcatacagacatactctgtgcttaggacagaaacccctggtcttagagcattcctactgtctcatagtatgtctacaactttgtataaccacaaacaaacaaaacagtcctttccttcatttccttcaatgtccagagcatgaaattctgtcctgggtgctatctcggttagctttttgccaacctgtcacaagttgagtcatttgagaagagtgtgcctccattgagaaaatgtcctccatcaatctggcgtgtgggcaggcctgaggggcattttgttggttaaatgattgatgtgggagtgcccagctcactgtgggtgaagccagccttcggctgatgatccagatttgtataagaaggcaagtggagcaagccaggaagagcaaagcagtaagaaggatccctccatgacctctgtatcaggtcctacccaggcttgacttcctttgatgatgcactgtgatgtgatgccaaagtgtaaacccttttcttccccaagctgtttctaattgcggggtttggcaacagcagtagaaactctaaggcatcttccaaagtgcttttggagaatgaggtcttcacggagaacctcgagagcctgcaggaacccacaagcttggtattgacattgtgcagttcaatgacaccttcgctgcccatttgaagtccttctaaatattgtgcatttcttcaacatgggaaagcacaagtcttatattccccatgatgcttccctggtacatggtctactgcttattggtctgaagcttaaaaggaatggacccaggttagacggttaaccaggtatactcccatctggtacactagcttgcacagtgacctccgaatgcctgcactatttatgtgagaggttcttggcagtggaggagcagaagttaggttggtgggtgtatggcatcacaggctgacttctggatataaggaatgttgacatccatggtgtatgtacgtctgtccttcaaagcctccctgctctccctcccccgggtcttatctctagtacctgttagaatcttggtgatgtagaaggcacacatacccagagatgcattgtaaatacattgatggctgccgctgccatccgtggtcatgataaaaagagtcttgtgggggaactatgtgagaaaatgtaacaagcaaagacttagacatctctccagtgaaattaagatcttcagagatcctgagaggattcatatgtgtcactagagttcagaactcctgagagggataaatcagacttcattgtgtggcctgaagcttaaaaggaatggacccaggttagacagttaaccacttatactccatcaagtgtcccctgctccccctttattcctggacctaattgtcatcttgtaatgcacctacacagactactttctcctgtttctgccctgtgagttgtgggtgatatctggaccattggcatcacagctctttggctatcttattgcaggtagtctctcaacagcgatttgctgtgtggttagccaaaggcagtgaatcatgctttctccttagaaggctcttctgtctggattcagatttctgcttccttctcgactgctgcaaggctttggataagtcacccggccttcacaaatctcaggatcttttaactgagaaattaggacacaagagtcaggggaagactggtcagtcaggacagtgtttgctatgcaagcctggggacctaaatgggattctcagcaccccagtcaaatccagtgacatcactggggaggcgggagaattccttgggcttggtggacagcttctccagctgaatggatgagttctgtgggactttatctcaagaaataaggtagagagcaattaaggaagatacctccatgttgacttccgacctcctcatgcatgtacacatgcatacgtatgtccctacggtagcacacatgagaagcatgagcacacgcgcacacacaccatacatacacaaataggataccatacttggagcacatatactaaacttaaaaaacgagacaggaggagcagaattaccccccagaacaaaatatactgtctgtaagctcaggtgtgaagtggcaatcacagggtcctcaggggcctgggctctgtgtgctctctgaggctgccgctctccatgtgccctcccatcccaaccctctggtcttttttgttccccctgtggctggcttcctgcacctgccacgctctgcctctgtgcataggaggaatgcagaacaaaggccaacccaaccactattatgctctgaatggtgaagaaaataatgagagaagtagactgagccatttaggactgaagaacccagtgtcaggtggtggacagaagttaggaggacatgtttcctaggattgtgaccctttgtcatctgaacaggcgcatgacacagacccctcataatctggcaggttgagtcctaggaaaaaagagattgctcacatctgccagctcttctctatcagacgtagtttgagtgccaaacactggcacctggctggccttccaggagctggcaaatatcctgaaaggctggaccagagatgctgcccaaggtaagtgcagaaagagtgaacacctaactctgatggcccggacaggcagggctgataacaggctctgctcacactgaatttccccccttaccctgcaccgcctgcttaggacaaacatattttactggccatcacttggggtttggacctttgtgtgtatgcctgtgtgttctcaggcttttactaatccccttccttggtttttgaggttagggagcgtctnnnnnnnnnnnnnnnnnnnntggtttttgaggttaggagcgtttgggatttgtggagggaggaagggtatgaaagggtaaggcaggagaccctggtgcctggattcaacctcccacattccggagatccctagaggcccctctccccagacccttcagctccgaaaagccattgtgctcccttctggcctctgaccccgaggctctgggaagcagcaggttgttgacacacggacaatcatttcttgcaaagcacaggcctccctctctccttccctccctatctcagtgctcacgagctcgctctctctctctctctctctctctctctctctctctctctctctctgccttgccctggtgactttttcacagccaggaaggcaagagaaactgagcaagagggaaattaagtctctatgagagaggaaaagaagaagggaagaccctcccaattttgggtcccccaaacatcttagttgtctgagggaccctcctccggtagtctactactagtgcagaagtgtgagcccccctcccccctgtacagccacgtggatcccagtagtatgtgatgctaccaggaagtggctcaggaggagcgcttcttttgagagtctcacttatgtgaggagccctgcatttcttcatgaagaatctctctgtgcctgtcctctgtagtcacgggaacaaagagcttcctagccctgttgctgctgcttgtgaggaggagtaagacttcagatgtcatttgccctgtcagagggttagtttgctctttggcagaagtgtgtggaataagctacttgcctcatgggcctactgtgcagtgcacatagaggtttctgtcagggagtgcttgacaagcttcagagcgctcaacagacgcacgtgtgggttactgatggttccccatacagctctggctagtagtttgtattattctcatgggcaggatgggagttccaagctttttgctcctcctgttctgtctaggccatttcaaaagcatttttaggagaacaggtggggtgggaaagagagtcctttaaaacttcaagcatcactgtgtatgcttttcaccttggttggctagccgggaaaccagttagcccgaataaactcaagtgtgtgtctctggccactaggtggccccactcagcagactgggtttctccaggaaagaaaaacagaatggtttgttaactacagaaatatctctcccttgtgctctcattctgaaagaagtggattagtgtggccatatttaacccctgaccccgagacaaaggcattatcaaaattagttactgagagagtccgtcttcccctctctgcccccacttccctgtttgcaggggcttcactaggagctcggtaaacttcagagtctgagcaaaggtttcggaggccatggttgccttggagatattctaaagcccgggctgtggagatagtctaatgtggactgaaggatagagccgggatctgtactcatgtgtgggctctttctggcttcagatgttccattggattttagaaccgtattttcccagtttttaactatatgctcaactgtcacttgagcctcagatcttgagttgatcttaagggtggcatccagtgtctttctccgtccatccctctgtccgtcctggagtccagtccctttggaggtggagatgcagctagacctaactgatcctcattctctttgttattgagtgtcttcatagcctgggctaactcaactctagactgtctttctatctgggacaacacaatgacaataagcatccccttgagctacgtctgaggttagatgaccatgggacagttgtcaggggttagtgagtattatctgtcatggtcagtattgtccttgtcatcagcatcctagccacagcttcctcagcacctccttggtccccatcctgtcctcctgggataatccaggccacactggggtcttctgcctggacttcttgtttcctgactctgctttctccctgcacctttttttttttttcctggcgtttacagacaccccgcctagccttcctggatggagtttaaagtttgactttctttcattccaggaagtccaacttgcctggcaggatcgggagggaaaggcactttctttataagctctcgatgaaagctgtaaagcaagccggtcaagggtctggccggccctggctcaggattaaggccagccctggaatgctgagggggcctctctcaagaagctagtatctatttacagtgcatgtctcataaacccgaaagccagggtgagggcagggggactcgccctcctggcatgtgattgattatctggtatttatgccattgaggacttgtcagcggtctggggtcacagggtcatctcgtgtgtcttgccgccatcccgccctcttttgtacagtgtgggccagggtgcactgggcacaaaacagctttttcttttccttgggaaaagggggaggggggacccggggcagtgtcaatgaaaaaatgttttcaacctttctcaatagtgctcttttaattctaaagaacatttaattaaaagtagcaggaaaattcatcttagaaggtttaacttaccttaacagatactattgtgacaaaaaaaaaaaaaaaaaaagtaaagaaacgaagtaaaaggttttgtatctcctgagtcctccgaggccacttttgcttgccctgtggtagtgtggtcctgacttaggaaggagagagagactgggttattgctaagcagggttacgttggtgtttgttgtctgtacagctttttcttgtttaggatggaggctccaagttttggatggaggctccgagttggatatgtgagcatagtcccctagaggtggcagcctggccctggggtcccctcatgatcccctttcccagggctttttcagcactcagagcttgggacacctggagaaaactactacatcagtgccagtgttttgccattcaggtatctcaatcctggaaaccactctcttgtccgttgtggtagagggggcatctctctagggaagctactgcctctgggacgacagtgtgtgctggggctcagaggatctcctctttctaaaatacttggagagagcagggcttggtttcccacctttgtaggaggaacaagtccccgccccagcccatgatcagcagagaaatctgcctgctcactgacgaccttccgtctgctgaagttcaggaatggacactatttgtccctatccccatagaggatcttctggagctggggcaagccagaacactagtatggagtgctgccccacagtggtcttgcggtctgtgaagggggtgtcagcttcagagacccacccaggctcccgtctgtgggacacccagggtggggaagcatgactccctcctgggacgttctgtctgccacgctcagtttcctggatcaccctgcaaggctgggcaggggattatgtgcacagagttggctatgtgtttgctgtaaagccccatgtccccatagcacaggggtttgtctccctgtcccacccacgcaccatcctccacaacaaagagtcgttgtctacagaatagctttagaaatcccaattcttttctatttccttcattcccattcaagttaaattagtgaatgctaatttgggttgatgggacacactgggtggaagctgaggttctggctcctgctcagggaaggaccatcgtggcagcatcctcaccagggtcacccagtgcccggtgccccatgctctgggaatgcttggtttgggttactttcttagtctcagatcagctgcgcaaggtgaacattgttgggtctaaaagacaaaaactcagaccgagcacaagtagacttccctgacgttatggctaatgaccagcacggttaattctgaaatttgctttaagctattcggtaacaaacatttccctcttccctgaagctgcttagcatccccgtaagacagttactgtcgttgcatttttctcagagatgaggcacagaggagtcaggcaacttcctcctggccacacagcagcagcaagggttagaacaagggtgtggatctgattcatagtgagtgacacaaacaagaccggaacccagagccttctgccgccagggctcggtttaggtgtgtttttcctcactatcctgacatccattactgggagacattatacagagacatacataaatcagccagagaccggcaaaaggtcacggtgtaatcagacgccatcctgggtggtgtatggagaggaatctggaggaagattagggattcaggcttctctctaggctctgagagaggacagcagcttcctttctagtaactttcccattatactcctctgtattctctctctctctctctctctctctctctctctctctctctctctctctctctgtgtgtgtgtgtgtgtgtgtgtgtatgtacacacatgtgcacatgagaaggtcagaagacagtctgccctagctaactttctttttcagcatgtaggttctagggatctaatgcagctctccagacttcacgacaagaaccatcactcactgagcccaagagaaatgtcttatttgtgccccatctctggatcatctcagagttgataacattaaataaatgctaattaaatgactaagaaagattgaatttggggcctgacctcactgtttcatgacagtactattgatggctttcttcctctcaagtgtatgttcactgcatcctaggggctctttcaggatccctatgggtcttgatatcttcaagggaaactgaggctaaatcttactaaaggagtcaaagcctttggacttaccaaaaacttattattttttttattacaaaaaataaaagtaggctagggaaatgtctcagcaggtaaaggattcaccaccaagcctaaggcccatgtggcagacagacagactgactcctgtaagttgttctttagatgcacggaacctgcacagctacacacgcgcgcgtgcacacacacacacacacacacacacacacacacacacacacacacacacagagagagagagagagagagagagagagagaataaacaataaaaacaaaacactaaaacaatgaaaaatacatatttttctgattacaacaaccttcccttttcctggaatgacagaaggcaggagcggagggacaaatgcagaagtcagcgaggacagcagagccactgtgggcacagagcgtgcacattgactgcatcatctggtcgttcatgctcctagctgggagttgcctctttttatataaggatttctggatctctgatgttaaatggtagccagttgattgaaatgataattcagaccccgaatgctaaaaagaatagtcttttatgacccttaatgagtgctataaaaataagaggtgaatctaattttatgaacgatcctttatgacttacctgataactagtacttgttcagcacaaagaacacataactcactcaggccctgtgctggctgcctgcagccaaatgacctgtgttaggagtccccatggcactgaacttgaaggatgcggacttgggtggtcccaacacggctctctctggtggatcataagactggggttcctcattttgggaaagtggtggtattactctcattaatgaagcagaatacttaataaaagtaatttaaagaaggaagagttcttttggttcaagctttaggagggagcatagtgcatccgagcgaggaagacatgtcagcagtcatgaagcagggaggtcagtgttggcgctcacctgagtccctcctgtttccttctcttgtcttttcctgtggatggcatcaccacttcacttcacggttaactctcccctaaaacaccaaaaaatacatgatcagctgtgtctcctaggtgattctaaacctagtcaagttgacatggagattgagcatgttggggaagtgaagaaggatccagggtgaggtggggtagggttagagagatggctcagcagttaagagcactgactgctcttccagaggtcctgagttcaaatcccagctcatgaccatctgtaatgggatccgatgcctcttctggtgtgtctgaagacagctacagtgtactcatacacataagtgaatcattcttgagaggagggagagagggaggaagatccacttggcctgacaacacaatatgaccagggctcagaattgtttccaactaagaaggggttgaaagggggaaaataccagcagattctcagacatttagtggatggtgttgattctacacataggttgtctgttatgctaagcaagagactaggaatggagagaatggctccctttatctttgtctaacaatgagaggaaagggaggaggaggaggagagagaatgggagcagcagcttagtgagatattggtgaggatttgaggagtcgcagaggtgtccatgtttgtgttatgtgtgggcacatgtatgcctacgagcccctgtctgctttgaaagctccatttggattactttatataaagtttatttttagattatgtgtataggtgtgtggatttgtgcatgggagcgcagagcctcaggaggcaaacacagggtgttcgagtcccccaaactggagttatgggtgactgtaaatgcttagtgtgggtggcaggaagtgaatctagtcctctgagcttttaaccactcagctgtctctctagacccatggtcacaagtctaaaataggatatgttggttggctctagagttctagccttgtccatgaaagccattacataaccagaggccggggcttggatcctctgggtccatcgtgctgacttggaagcagataggctttggatagagggtgtccaggtttgcaatctggaagtggtgaaggaaggagaagataaagctgtggtcaccatttgtctcttttcttcactttgagaacaggccctgtggtctgagtgaacctctccccaggctgttgagctgtgaacacaacacagctttaagagctctaaccccccctcttcctgacgctcactgccccttatacacaaaaggtccaatgaaggttgctgggtagggcaaatgcacctgtcttaggtgtttccattgctgtgaagagacaccatgatcagggcaactcttataaaggacagtgtttaattgtgactggcttacagttcagaggtcaggtccattatcatcacggtgggaagcatggtagcatgaagacagacttgatgctgtcctccagcatcaagaactgagagttctacatcttgatccccaggcagcagaaggggattagaggtgtgacttcaaagccccacctccacagagatacacttcctttaacaagccactcctccaaccagccacacctcctcatgatgccactccccatggaccaagcattcaaacacatgagtctatgggggggcatctgtactcaagcccccacagcccccctccccatccggatgcttttgcagtcctgacttagctgcggggggtcttgtctctgctgttatgttgggtctgctttgccctttctccttccttcctaggcagtgaactgctgttggggtcagaatgaaactgggtgacaaggagagggacgactgctgctgagtcttggcatgtggagtctgataagctttgctcaccctactggctaggggcctgaagaaatcatctgtcaaaacttttagccatgagcccaaaacacccataggtgaggtggggagaggcagcctgagccttgtacatagttcacttgcatgttgcaaggctagagaccatgggaaatgagaaattagccacccccacacacacacacttttcaatgagttggtgtgtcaccacatgagcccctgttgccaagcatttttagaagacccgggcctaccattgcttatctgttctaagcttatggggagtgaatgcagaactggtgactccacccggtgtcctgatacagagctcttggctgtgggggtgacagacatgataggtcacattcataccaaatgtcctgagggagacagagatgcacagaagtggggggggggtagagaaagggtgcagacacccaggggacaggtaaggctccctgaaaaggagagaccatgaggttataaagaaacagcaggaattggctgggatcaacggagcaagaggcagaccacatggaatcatgtgtatttgaaaactgttgctgagaccacatgtggctggcggagacaggggcagaccaaatcctagcccttctttaccatgttctctttaccccagctccccccacactgtgctgaggagtccggggtggcatgggctgattctggagaggtgtgcaggtggcttgggatggattggctggtgtctgtagggagtgaggagggagacagagaagtgctagatgactggatgaggagggtaggaagaacacagaggcgtcaacacagtgtctggtgcgggcgacagagcggctgttagcgctggcagcccaggtgacgatcaagagacaaaggtggagctctcgacagtgaataggttgtgtgcagatgctggagcatccacagagcacttgggtctgcagcttttgctctccagaaaagtgtagttactagcttcctagtgttcacggagaccgttaagagttcagttctcccgagacagatgtggggatgagatttacagatgaaagagcaaacccagtgtgcgtgagcattgggttgaaggacagtgctcagcagagatgcagtgctttgggaaggtgagcaggtttttctggctggagggtcctgcagaagtgaactggtgctggaatccccagagccaggctagatgggctctcagagtgagggggggtttacctggtcctactagagagcagagaccagaaagctgagctgtggaaccactggggcctctagagatggcaagtccgttcttctgacgcccagggattggatgctctgtccttcatgctgtcgatggccagttctcagagaaggacctaccctattgttctcgccttcctaggcagtctagtccagtgcagtgcctcccgccggttcctgggcctcatccctctacacgtgtgcctctgttctcagatgtgctatgcttggctccgtctcatggtggggaggggcggggaggggcagggttaaaactcagtttccttccaaaggaagcagagaaatggggtcctcatacggtccttatgttcttaggtcctcacaatcctacaccaggtcccgacatgagcacttcatttgggatgtgtgtcctgcttcctctccagacccttccctcagtggtgtggcacttggggaccagctgccagcatgattgacacaaagccaatctataaataaagtctttttcttttctcataaagactttgtggttgagtttgccttcaaggtcaagatcagacctttctaaataaacacatatcaaaggatcattagcaaagcagcactgttaaattgagatattaacttctgtcaactgcttgcttcttttttgttctgtaactcatgactgcagtaggtttttattattttgtccttaggcggtagcatctggcttctgtagagactgtaaaaattaaaaagcaacacaaatcattgcgagagaaaaagcagtaaattcaatgataagaatttaaaattaaaatgttgcaaagcttttatattctgcaaaacatgaaacgaatgagtctgttgcctgttgccataaacccggcccagctaatcgtctgctccagttttttccagtctcctttgctcatcaccatcaattctgtcttggcacgaggcgagacataaaggggagagctctgtgtatatgcgtgtatgcatatgtttgcatgcgttttttttgcatttgcatgtatatgtgtggatatgcacagccatgtatgtatttgtgcatgtgtatgtttctgtatgtatgtattcatgtgtgtgcatgcaattgagaagctgcatcttgtggctctcccagacagaagattaaatatttgtattgaagtcattcattcttattgcaaaatagatttgtgattctgaacctagctgtgttgtaggcaataagggagattaaaagtatttattatcatccctgctctggtggaactagctataatatatatgtgtgtgtgtgttatatatacatgaatattatgtattatatcatactacatatataacatgtatattacatatatgtaatatgttatatataatatatgcatatatacatgtatattacatattgtaagggagattgaaagataacatgtatatattatgtatgagatatatctgatatagactcacatcatacacacacacacacacacacacacactcgagataatgtgggaccggagaatagttaagattacctactgcatttgcagagaacctgaaatcagtggaatcagtttccagtacccatatctgtagttcataatcacttatagccagctttggaggaatccaccaccctcttctggcctccatgagcacacatgtatgcatgctaaaacatacacacacacacatacacataaataattaaataaatatttcaattaaataggtagaagatagtttggggtgactcttcataaggttaacttgatgtcaccaagctgtatacaatactgccaggagccagtggtggcttccctcagaacctgggttgctttgagctaattccacagacccatctggctctggtgtgtttggagtgagcatttgttgagatgagtttactaccccccccccccgtctgtcctaataggactgtggggatggcagtgtgaattggggaccattcaggtcagttggctggtctgactcctggaccgcaggcatgaggctagagatctttgttcatgatgaattctctcccagggagactggaggaagcgctaggccttggcctccatcaaagggaatgaaggaaagtgtgaagattaggggacagagaggtggagtaaagagcatatgactaactcgaggtcacagaatacattgttctctgggcccagatggtccttggaataaatcagcccgggcagaagcagatttccactatgagtaagttgcacagtgacacaacccaggcccctggccctgaatggcagccattcatttctctgctgagggtgtcaggaggagggtgtgtgtgcgcacgtgcatgcgtatggtgcatataaacatgttcttatagcctctgattctcacaggcaagtgtgggtgtttatggggtgagggctatagggaggtttataagtcggagcccaatactgagagctttatacgtagccgtttgtttccctttatctcagtcaggggaaagagaaccctccgaaggcagggcccgcattggtctataacagcgtgtccccaggcctcacacggtacagggacaggtcacaggaggtggcagaggagtgaacatgggcaaagcttgggcacaggtgtttgtctctcgctcctccaccaccccatgttcacacacatgaataagtggacaataattatgtgctatttctcatatggctcccaccttaaggcactgttgtagactgggtaaggtagagtaggaaccctcatcggagccgtcacacaggtaggcatcattgtcacgcacggttcccagtagccatcacgatggcccctgcttggagacttgcaggcatatgcaggacacaagctgagtgtgggcattacagtgccatgtgagggcgttgctagcacaggaagcgagaggcaaagagggaggcttctgcctccccttgtttgcctccaaaggccgcggcatttctttgcgtttgcaaaagcctgtgaagacttcttaggagtgaggataggtcacggctaagcggtgagaacaccgagtaaataccaatgatcaaacgattctccctcgagaggcctttcttcccatgaagctgttaattaatataaatgtgctattcttacattctaaggcatgccttctgcatagactgtatacagctgagaatcccgctcttcctaagctgtgttcttggacgtctctgtccgttgcagtgaagctgctttggagagtcaagacagcttctagctcctgcctgtttagagggctaagtaattggctttgtcctaaagtgtacagctaagtgcacagtgggaggagtagatgaagacatccctggctgacttgcagttgagctagattttacccataccccatgggcacacacacccctccacatcttcatctctcaccttcttccactccattctggtttcaccagcctccgggtatttcagaagacctcagactgaggttgctaccatgtctagtggggtgttatttttctcccattcatatctaaagccttggggaatcctctgggctgtctcatgaatgctttcttcaccaggcctctcagagaaagcttgatggtcattaacagtctctgacagctggatttaccagagaacccctgcatcctctcttcaggccattgtgcagttagcaacggcgactgaatagcacagcggctgaagcatgaaagagaacggagctgggtcccttatgtagcccaggaatgtttggaagtggaagtgccaaggagtgataggtggaatgccaaggagtggtggccatgactcacagtttgactcttgtgctaaacactttgtgtctttgtggccaaatacccgattgaacaatttaagggaaaggagagatttatttgggctcctggttggaaaagttcagcctttggtcactttgccccctgtgttgggacagagtgtcatggagatgacagtgttcagtggaggctaatcttcacttctagatggatggaaacagagagaagtgcgaggcagcgctctcaccagctgcctccttctcctcttttactctgtcagtgtcgtcagcccatgtgacacctattgtcagagtggatttttccccactgtgttaatctttgctgaaaacaccctcggagtgagcctgaacagtctcccgggtgactctaaatacaatcaagatgacaatgaaggctgcccactaccactcggacattgctttcatactttcatgcaatatacttcatgagatcgagcagccctgggtgagagctgtgtggacagattatccatgcaggcagctttgacttttcccatgaatatggggactggaaaaatcattggacaacccccacctaggcttgatgagtctatgctataatgtcttgttgtagcaagatgatacaaatcaagtgcataagagatgcacacttaatatacgggcccagaaacttgtaacttagagggaatcaggatgggtagctggagagggcaagaagtcatgtttgcttttgaggatagtaagaatcaaacgttaatggtttggcctctggagatcataactagcaactctggcccatgctcacagagaggtagtactagttcgtttgttcattcagccatttgtctgttaatccactcagtaaatactgagtacccaagatgtagtgtgtagtctattaggttctgggaatttagtgacatgaaaatcaagagtccctgtcttcatgagtctcatgccttctatgaaaacagataagcagttaggcaaactatgtaaatgctctcacattgtgatgttgaatgtcaaagaatatgttagagcctctccccccccacacacacacatactgcttgtgccctacttatggataaggctttgaggagggggtgtctcctgggtgtggtctcatctaaagaatgagagggtgtttagtttggacagttgggtagtgggagaaaggggaaagtggtaggctaagagccaatgtggacagatgtccaagtgtccaagggtgggagagctagggtgaggacataggctgaaaatggctgtggagagacagctgagattcacaatttgagacaaaactgagactccccaaaatgactgtaagtatgctgactgctttctggggacagtagggaactattatgaatcataatcaagaataagacattaagttatggccatgtgtgagtagattggagggcttttgccatgggtgccgacattctgtgggatgagattgccatcatctagaacaaaacaagatagccaggcatggtcgggttaagtttcaacactcagaaggtagaggcaggtggatctctgtgagttttaggccagcttggtctacagaagacaggacagccaggactgttacacagagaaactctgtcttagaaaaagaaaatctcaaatccatacaattgcagcagggatggacaggatggacaggatggaccagaggacactagagagctggggacatttggctgatactctgtgagaggtgagaggcaaccttagacaatgcctggttttattttttttgcatcactaaatgatggaggagttggaagttgagatggggtacaagggatttgtcactaagatgatgaagggtttttgatattatgagaacaagatttgagccacttagaggtggaatggagttgacaaaagattgaggtggctattctggactcatcagaatgattgtctagagccctggaagtagaagttttaatactacaggaccctacacatcagcacctccaaggcaggcaggcaagactcatccctgaggaggagtcaggggatgagacacaagtgagtagaaatacgcactgtaagatgtgctgttgttggtaatgaagaagttgccagttttaagtactgttgagatgtctcctaagaggaagatgaaaaatgtctggtggatttcatggcaaggtgacgactggttatcagagatgagaggtttgggtgttggcaaaataatggccacaggaatgtagtggcagtggactgaggggtacaggggcaccctggaggtggaggtaccatgtgtggatggctctaggttacagaaggttaagccgatagaagtcaagatggtgaggtgaccacggcagaaggaatggacagggaagctgaaggattggccagcagtcagaggatgcccgaactacatggaccaggcaagaaaccagggaacaaaggagagatactggaaggtcagagagccattctggtgggaggaaatggactggagaacttgaaaggtgtgtcagtagaccagagttgaacaaaggagaagctgcccttttcatgatgcaaagcctgggctgtccctttaaatgcctcctggggcgccctgatggattcaatggaatagactcagtctctttgtgcatccctagcagtgtttgataaaaagcacaaacttctttcctcatggttcgggagtctggacaagcccacactgaagtgccaacatcgggtgagagccttccacagggttatcccatggcacaagaccagaggacgaaaagaaggcagtaaggatgttgagcagtgcagaggaagtaaaagcaggacagactcccttacaaaggacagactcccttacaaaggaactccactcaacctttaggccccacctcctaaggcgacactgtcagttgaagaggggcgggaacattcggatttaaatataccacccttatgcaacctgcaagatctgtggtctaaacagctactatttctcaccggttgctatatgtcatcacagtagacactttcagatgtgatctaatccagcaaccttgtctgatgtcactacatacggttgtaaaggtaggaaatggatggcggaggcggaagcagaagctgagcctggggtttggtctgcctggggagcataggctggctgttgctctgttctcggcccacaggcttcttagggacatgatgtcttactgtcattggcctcagagcgtgacatttgcactgcctgtatttttgttttatttgacataaggtcttcctacgtaatccaggctgggctagagctcactggacatagtcttgcttgtgcggatcctcctgcctcagccctcttcctgctgggattccaggtgtgcatcagcacatattgcccgatgactgtcattcttttccggtgttaggatctgaggctaggttcacctccagaactttctctacagcatcctgggtgtgagaaaattaactgggttagtcttttgtacaatatccagtaacgctacattgatcattcgttgggagtaagtgatgccccgtgtataagagaagtggaccccactctcaaggagcaatggttctgacagggagggggacacaggaagccataaacttgaaggactcatggagtcttggttgagaggcagacttagcccttacccagtgtcattaaggaccctcaggctgtagctgtcctggtggctagactgagcatctcttctgttcttggtggcaggtgaggaagtttaaagaaaggaaccccagtttttggtttgaataacttttgagagtagagcagttgaagagtatggggaactgtgaaccagcctagaccatggattttaattagggttcttttaatttggatggttccgtaatgcttgaagcagttttaaaagtacactttaatgaatcttcattgtttcttagtcataaccaacacccatctccaggacctggtcatcctgtgacgctgagactttatacattaagctccacacccacacccgctctctccagcctcctgagcaatggtgtgctccctgcctcccgccacaatcccaggattcctcagagaggtgaagcctctacacacatgctcagagtgatgtctgagaagaggggatgtggcagaatagtcgagagctggcctaacacacacacacacacacacacacacacacacacacacacacacacacacacacggctcagtcccgagtactaaaatcaagaaagagaaagaacactgtctatgaatatataaagtaaaatacataaggctttaatggaacctaaaatacatgtcaaataatattttaaaaaccatttgtaggctgggtgcagtagcaaacatcaattgtcccttcatgtaggagactaaagtaggattgctagtccagggctaccctgggctaaatgtaatgagtttggagctacatagtgaattggaggcaagcctggaccgtatagcaagtccctgtctgaaacaaaacaaaacaaaacaaaataaaacatgtttaacacagtaacatgtgtgatttcattgttatcctatgacctaacagggcatgattgaataactgtcatatttttgtaggtgtggctttcttaaatgatacccccagagtggcatgaaaatagctacccatgacaaaggtgctccaggctgctttgcttctaacacccccagtccagagaactgcagactttcccagtgagaatcgagatgttctatttccccatccaagttcaccagcatcctgaatccttgccctggcagctggggagtttcacaggcttctgtttaagaaggcttgctgagaggcggggttctgccctgcctccaggggccagagcaggaggtgggggacgctgatgagtgggctgtggccaatgaagccttcctcatgcccaacatcccaggagcccagccaacaggaaaagttcccccattctccccgggaggccgccagcctgctgtctgagagaggtggggccgctgccctctagaagtgtgcctccttctggcagcacactctccgccccctcccacccccttgtccaaaggcctcctacagaagggagccatatggccctttgtggacacattttccctggtacagtatcttcccggtgtgaatttgggacctagtgccccagagtcagctgtctgtctcctccccaactggcccccctccccacagcagcctaggggagaagcaagttgttgtggggacaagcccacggaatcagggagccctttggagtcggggtgagtgagaagtgtctctgtggcacccacacccacgcccacacagaaaacagttgaagtaagtcaaatgtctcaaagtcagatcctttttagtatgaatttgctgtgtctcattccgagcactaattccaatttaattgcaagtggcctgaagcctcttcaataggagtaacaaatggtttgattttgtaaacttcatcagactgcattttaaatgcgacacagtagcccaactcgaatgccaatgaagcactggagtagctctctgtttactaattatccgtttttactccaagccacgctggctggcttgtctgattaaatcggatttgtgggatagagagcagctagcagagttttctctatagtaaacgagattgaaactatgggccgcctggctgcacactgtaaattatatttccttttaaaggggacgtgtctcttttatttcaccgttgtccccccctgcatattaaactttacagcacaggaatggacccagcagcttctggatgtggtctctcagtctccacccgacaagagaggggaaaacaccgggaactgttgtctgtgcccctctacctgtttcctctctaatacctttctttctcccctgtatactagcgttgagtcttcttctattattttttctttgtccgttattttcagaggtccttgagatgatatagatttgtactgatttagctgaaagagttctgtgataactgcatcagagtgatgttgggtttggtagcagtaagctggcacgtgtgcagagtccagccatacatttggtgactgtgggttcacctgcaacggaagatatttcctaaaaatgcaaatgggttcttttggtacgtgctgcaatggtaggtatccttcactctgaagcgagtgagataaagatcaccaggcatgtaatacctgtggtccagcagattgggacatgtcgcagttatcagtggcgtgggagtgttacaggttctcctatcctcccactgtctgtctggttctagtgactgtctgtccaagtgctctgcagcttgtttgtttcttcctgttttttttagggtagcaaatcagtacctgtctctggttcttccgtgtacatgtgtacaagcacacacacaggcaggtgcgcacacacaggcaggtacacacacataggcaggcgcacacacgccaccgataattatgctggcacattgagtggggtgtaaccagactgctcttacactctgccatttctgagacttttggtccccagtccatccatgcctcactctcggtgtctgtctctgtgcctggagctttttatgtgttcatttgcttttgaatgtcctgcaacactaacgtgtatgcttttcccttttgggccattgtgtgctgtacagtacaagaagcctcacggtgtctctgatagcctggttaccgtgggaatgaatggcccgccatgctctcgggcctacagtcctctttttaattgttgacagtaaaaagcatttaaatgctccttaatttgtaatcatcttctgggggagaaagagaggaaccattaaaatgtcagtaaaatgaatacattttctctttctcctgattttttttttttttttttggttttggtttgtttatttacaggggattttttttctcttcactgccagtgtttgtcagatattgcaaatgctctgaaccaatcagtatttctcttacttctagtttctgtctcccctctccctccccattctatgctatctctctggggctctgttttgtcctgtctctttcctgtactcctgtattatgtttagcccccccccctggaaattggtcaccctacccccccttcacacacacacaaagattctacttctggaccccataaccctttctgggggcatctggtgccattatgggaactagagaaatggcttttgtgaaaaatgtctcgtgtacttgaagaactacctggaatcattgtctgtgccggtgtggaatccggtcccatgtttagctagaagccccatgctctctgccaagctctgaatgctgtactaagagagtaggggcccactgtgcactgggacctggctaagaccagaggccactggatccagaggggtctgttcaccctgcccctgtgtgctctgcatgcactttggtatcatcccgacgctaggatgtggcaccttctgtctcgactctgctgcattctcagctatcagaaaagtcttgcctgactcagatggggttcagggatccatatccctagccactcaggaacatcacaggcatggccagtctgaggattgacttactaggcctcggggagtggttccccaagtttttcttgccttctcttgctaaaagtttgcatctcacaggatccttacaagtacctaagacatggattggtccctagctgtacctagtcaatgtcaggtccatctctgctttgcctgtgacaagtggttcccactgaagcctccagaatcacttgaaggcacttggccctgtcctccatgggcctagaacattggctatcagagatggacaaattcttcaagggtctttccttttcctttcattgtccccgtaaagagcctgaggcatctagccaggagctcacagtgtgtccttgagccaggtaggccttcttgctgaagctggcatgactttctgttctgtatgtagcctcttcaatgggggagtctactataaaggtcacatgagggatggagcaagagacaaaggctgggtgaatagcctggcctggtctgtctcatgccatcctgactctccatcacacacttttggagcctctgttcactgaggtctcccaaaccagatgaattggactccaagagaccaattctctggaaggaccaccttacggagagcaacaggtcacccactgaccatagagattgcagacctgaagatcagcaagggaaatggacttagagaggagctgacttgccctagatgaaggctgtatgatctctgaggctctgaaaagccagagagttgacagtatgtctcgccttgaaggtttaccccagtagaacaagcccaatagggaaaccgaaggatggttttttcctccaggtcctcaaagaggtttggcatgacatccaccagtaccaggctctctcccatccttcctccggattgactaggtcatctctgatagaatggagccccctagaagcccttgcttcacacctacagggctgggctagagtcaggctaggtgagctcttgtgggctgcctgtttttcctcccagggctgttgaagttggtccaatttttcaatcgtgggccaattagtttcacaaatgggggcccctgtggtgccagggcacatttgttccgggcctgcgcactgaccaggccccattgtcctgcttcccacccccttgtgggcccattgtccccgatctccagcaggccctgcttactgttgatttatatgggcaggcgtcccgcgggctccaggcttccctgccacagctggccgaggtgcttaaggcctcagactccctgacctttgccccgtcctgctgtcattttgaaagttacagaccagagggctgcatacctctccggatttactttccatccctacccgccccccccccttcacaccctcttcccatttcccttccagctccccctgctctgactgtagaggttttaagttcagtttggaatgtctgcaagggtccagcaagtagcctcggaagccaaagaggacaggggctgctagagcaggtgactctccctcgcaaggctgctgaggctgccgcttctatttagggaagggcgttctcatccccaggttcatgagttctgagacttatgtgcagttgggaggttcaaagtaacccacagggtaccagaatgtgtgatgtcattttgcccttggcatctcttgtcccgtcttggcaccctaggaaaggagacccggcgtctatgaaatgggctgtccacagtggctgacagcagagagcaggtctgctcccattgccgtccatttctgctctcttgtaaaccaacaccccaccccacacacctttcctctacctcccttctttgcttttccacccctctcacattttctccccatcttgggcaggtttgttggagtgattgacaaaattagtaaatccattcatgttacttttattgtgcaggtctcaataaatcccgagtgtccggggcgcaccttaatgagctagtgagctgacaaatttgtttactgtagctggaggtgcctggtaatgaaatgcgcttgtgtctgggctcactgctaaacaaatacacggtttccgggagggaggcagcaggctctgctagctgcagcagcctgaggaagcagccacattccccaagagactgacttgggtgtgtgcttgtgttttgaaaaatgcagccactcagttttaaaacaaatttcaatcagctgcctgctcctcgtttatgttttccattgaggaatttctattcctttaacaaataccaaaccctggtaagattcttccttcccatcacataaatgatggagggttagagagatgtgtagatacctcctaaggctctaaaaagaaaaaaaaagagagggaataagggctggaagagcctggagattcacagggttgaaacagacaggaaggctaaggtttggggagaagtgactgtgtctgagacaaactcctgtgcaggagtttgacgctaactcagtggcaaggctttgagatgttttcccaggctgtggggtgagcaggataggcagagagtggctgggagggactgagctcttccctgttggctgctgaagttaccaaagggtcaagcgggctgaaatgtgcctcagctgggtggattggattcttgtgccaagggattctgccactcaacacccagagagaaattaaagatgtaaactggcagcatgtgggccttcttccagggcatttctgagtcttcagtgatggttcaggagaagacaaagggtagttccgcagatgtgagggtctgagcattcgtgtctgttctgctgcccactgcatgcatccacaccccacaggcttttccagcctcttaagatgcagacagagccttctgcctttactgcgagtcagctgtgctgcctgtatcggtctctggcacagtgggagctgcatctctgtgtcctcttcaacagcaacctggagggacatacctggtagagaaagccgagggagtaagagtagaggtatcttagggaagataatcccgaggggtcagcagcagcaggagagacctgcttgcagggttagaggaagggagtgaaggtagaggtgtttccagttgaaattgaggtgttttgcttagccccaatttgatatgttcttattgaggagacagctgctcggggtagtaggagagatggctctcttccttggtgagtgggattggacaccagaaacccatctgtacacacacacaccgtacacgccccactcagagcagtcccagcctgcttacccaaagaaacagaagtatatttagcatcctctgctttgattaaggaactgcctgtcgagggagataataagagccttgctccaagaaagtgtaccacctgagcgcctccaccagctgcagaggtgcccctcggatggcattccttccttttcattcaagtgctaattggcatggaagtggcacaggtgtacacaggaggcttttgtgtcttacacctcccgaccctatcatcacctggacaagataaaggcccgagatccgtgtcatccctcctgcctcctgttctatctaccctggcctggcttcctcccagtttttgctaaaattaaactcgtttttaagtcaggaacctgtaagctgtacctgtgttccaccccagactggctgtgcagctccggtgtggctcactctctcctgtgatagtgacctggcgcagctccacgctgctgcccgcagcatcttcagttcttctcagagccaagagtttcaactgtactgcagagaagaatttcagaatcaatccatgggaagccaacttggagtttctgaaggaaagattttagcgtagattcaagtgtgagggttaacggaaagagggatgcttagagaaaggggcctacccactcaagtgggcgtgtgagcattgaacttagatgtttcagtgatgtattggatttttggtatcttttgaggttgtgccccacaaatgagattgtaggttgacttcttaggtgcactgggcagtatttataatctgatcaggtaaaaccatggatcacagaggcttcacaggggagcttggacgtgtctttccctgaaaatggagttctaatcttgcttgagagacacctagagaattgctggcttgcagttgggaaagggaaaaggccatggctggtcatacacacataagcatggttcttatttgaaatatatcatgtaaaaggaattagcatgtagggcaacattttcagcaaatggtgctgcaattctttctccttaaatgtttgtgtgtctgtttgcatgtgtgtcagtttgtcacgtgtgtgcctagtgcctgtggaggcaagagaaagatgtcgaatcatctgcaactggagttactgatggttgtaaaccaacatgggtacagagaaccagtctggatcctctgcaaatagaacaagtgttcttaaccactgagccatctttccagtcccctgtgctacaactattgactctcagccagcaagagacttaactagattcatgagttgagatctatgggtagagacttctgtttctcccctacccccttccccttcttttctacttcaggaggatttatgcgaaaaagcacaggcaattgcatggagcctacctatgtttcctcaactcacattctaaagctgtcccttgggcaaatacttggggaatctagaccaagccacatctcccccactctccagaaatacgggccttgggggtggttgggtccttttcctgatgatgtagttctctttgggccgaggctgagttttgtatgtgattcataatataattcccagattggaagaagacattgatgtgtggcttttatacactctgcagtgtagtcagtcacctcgaggcaacatgaggaagcgagtgttagaagcagcaggttggttagtagttctgtgacttcagtgcagaggctcaggtcagggactgcgatggtcagctttctgttactgtaacaaacaaccgagagagtgaacctgtggatgggaaaggttgggtttgcttcacagtccatggtcccttgttgcccttaggcttgtgatgatgtggcattcctggcaaggagcttgagaaggaccaaaactctcacctctcacctctctcctctcacctcctggccaggcagtaagagagacaacagggtggaaactccatcactcagggataccctacagtggtttgaagactttattcctagagttcaccttaaagtttccgccacttcccaacaagaagttggacacaagagaacatttctgacccagtctacagctatggaaaggacagtagttgcctgtccagggatcacaaggccaagaacagctacactgggctataagtggggggtttgcactgttttgccatacggtgtggagtgactgcttcagtgtagttaattaactaagttcatgcctctaagcagcatagctcagacgatggtgcagtcaacagacatggtaggagtgttactattgcttttatgaaacatcacaaccaaaagctacttgagaggaaacagtttctttcccccagacttctgtcatcatcaaaagcagtgagggcaggggctcgagcaggagaggagccttggaagtaggagctgatgcagaggctgcagaagagtgctgcttactggcttgcctccatggctccaacagcctgtttgcttacagaacgcaggacctccagaccaggggtggctccatcctcatcaaccttgcccacagtcctttcatatggaggcattttctcagtcaaggttcgctcttctctaatgactcttatcttgtgtcaagtggacataaagctacccagcacagggagccagtgagtttggcatatgtgtgccacctggatttaatgattgccatggagataggattgtgtggggaggctcttggtagtggccttgcttattatagacttagttctgagctctcaccagacctagctctgtaccatgacctactgaccaccatctgccctgcgtgcacacacttctgttatcaccccagagtccctctgtattgtcatcacagcacacacttaccaagggcctgcttgcgttcacccctgtgcggtgtgctggtgaggagaggtaggacggctcttctggttcctgctttggcagcttcgtctcgtaggccgagctgaaagttaaaagtaaacgcaataaagggttttatgtgttgtaacagtgagtgctcagaagaagatggtgtccttggcaccaagtcctgactagtacaagtcatccaagatgccatggctagccggggtcagcttcctggaagaggcaacccagagtctataaagaagcatatgcttggtcgttgcgcaggggcttccaagagtcaccgtccgggttgttcactgcacaagggcgtccagctgagggagaggtggaggttaaaatgtagccccctctctagccaacagtgaggaaggaaacaggcttttctagtttggagaaaggcagcctttgggctggcatacagctaaccgctctgcgaagattctttcaagtgagtggggaatctcattggttgttcttagcaaccacagaaatatggaaaaggatggacacactccaatccagggaagccaaatggcttacacgagatcccaaggcatttgaaatggcagaactagaatctccgctccgttttcctctctccgtctcacagaccgtgattgctaaagaccgtcttcatacagcccacctccttcctgatgggagggacaaggtctggttcccatggctgcctcctcggtggaggatagaactgaggcaaggcagggagcagagcacactagcgacgcgggtccctcgtccctctacacatctcatggcagctaatgaattgctaatacaattttctagataattttatttccatagcccaggattttaatgtgtttccaaaagctagcatttatttgcttaatctcccagtgtaatagattctggcctgactcatcatacatgcaaacaatcagctaggcagaaacgacagcaaattgtttaataactcacatctagtctttagatttttaacttgcgcgtaccaatagtttttcttgtgtctcatttcctcaaccctttcctgattttcttttgctttttcctttttttcttttctaagtccttttctttcacagtgactgttggttttcaagctaaagagtggagcaggtagattcttgcacctttaaacactcatctcaccccaccagcccaccactctttgagtcttggttggtgagtaagtggccaaaggaaagaccttgtgtttgtgtgagactccaaggagagactactgagtcataatatttctttttaactggcaattgtagaaccttaagccactcagatgcagagctggccatgtggggattttattttcccttttccctcctagagcccagctcctgcacaaaacctctggcctcatcttgtctccaccttcctcctgtagtagcacaaaagccagtcgttctctcccagcttccagccacttgagaccatccacgccttggatgtgtatggaggtgctgcccactaggctgttggacacgtggcacctacctgtcttccgtcagtttgagttgctataacatggaaccatagactggatgattcatatctagaaatgaatctctcccggtcctgaaggggtgggcagtctgagatggggattccagcacggctggcttcctgggatgcccttcttcctagctgtagactgcagacttctgactgtgtcttgtgttctgaccttgaaaagggatcttttcatcttgttgaggagggctccacccttgtaataaaagactttgttaagcctgaatctgctaataccatccccttgggggtaatgatttttaacatactcagttttgcagtggggaaggggacatctagacctttacagcactccagccctgtggccccgctttgcctgtgggatgccttccatctatgctgtctgtcctctgtgatctgacctccccagtttgccaggcttgtctccatcctctgtgctacctcctctgaaatccgtttgcagctcactcttagccattttcttttacccctggcttctcagatgcaccccgtttctcggagctgaactcaaaatctctgaagctccgttggagccaccctttcttatctatgctctggatggtatttcttgaccaggcttggtatccagcttctctactccatctcagcctcttcttggtcacttggtaatggagtaagacaggtaaacggacacaaagcaaattcaggccattctgtgagatgcaggtggcccaggagagcagcttctaagcactttgggaatagcaaggggacaggatgccactcagtgtgctctgctaggtggcatatttcagggtatcctcctggagtgacattcattcactgtccaagtccatactggggatctcagagtaagaattaaaaatgttggctggtagaagcatgcctgttcaggaaacaagctcgctcggtctgagcacctagcctagttaggctttctgtgggatagagttcagggtaaagcgggtataggtgctgaaaacctatgacactggactgtggtgctgtgcattagaacttgtttgtgggtggaatctgctcttgcttaccgggctggactggacactgcaggactcagtgtcagagcttgtagctgcttctgcccaatggactacctctttcgcggatgtcctcctgcatcggatgggactctcttactggctccttcctgtggatcttgggtttggaaagcttcagttacctgtgcccaatgacctgcctctgattgtgcttcccgggccatttctggagtgatcacagcatgctttagtgcttgctccttactgtctaggggaagcccagatagacagatatgtcccaaatgaggttcagaagctaggaagtgactcagggtacactgactgatgagcaagcatgaggacttgtgtttggatgcccagcactcacataacagccaggcatggcttcctgtgcctgtaacttccccctgcaggtaacagggacaagccaatcccacagctccctggccaactagtctacccaaaactacaagattcagtgaaaggtcctgtcttaataaaatagatggagagccatcctgaggttagtaacctctggccttcaaacaccccatcacacatgtacaccctacaaaggtgcatggcacacatactaaagactctaaaataagtgggattcagttagtggtttctacaatcaaatggaccaaggcattttctagattaccagctctacctctttctcactgtgtgaccttaggcaagttatttaatctctatttttctctttggaagaaggtggcaacaatgcctgcccattagggatgcttgttttaaatgagatgacagcacagataaagcacctagtggaaatggtggtctttagtgtcctctcccttctgctctcagacctttggaggacaccaggggttcttcctccatgcagccctcccagctgttggttgatgaagcaagcatgaccgcaggtagctagattgcagtgtctgcaaagagaagagccaacgggtaattgtgtggtggtccttgccacagctccttgcccgacattttggattccctatctctaacaacatcagctaccaacgcaagcccatatgcttttctctctgcccatatttgggtggcatggcctgtgctcagtcccacggtgctgtctcttgtgcaagggacaccaacggaaaagggaggtccttgccttttattccagaccaagctacatgtggtcctgaggaggcaagacccagccctcccatttgctgtagccattgctagtcagggaggcagcaaaactcttcccgttcctttctctctcacctggcccgaagagcttccttatgccccactgagcagcctgagactttcagtagcccaaatgctctggtgctccttcctctttgcactcaactgtcagaccttgacctgatcagctttgagttgagtctcaactggaaggctgtgtcaggaaggtgttgagggatggaagatagcagcctgcttttgtgggcttcagtaggcagctaggctactgggccagccgagcaagtgaccaggtagaactgaatgaatatttcatgtgactcactagttggaaatcctttaacaacttcttgttggtctgaggatgaacccctgggctttgtagtatggctggtcaggacccacatgatctggctcctggctcctcttctttctttgtatgttctccctgcttctaacgttaggactggtcactgtgctcaacctggtgtggctctccctgagtgctcacagactcggttccaatctccatgcactgggtgctgggtgctactgagatcagaacagggactagtatactcttccagcctttcatccccagaaccccagagagagtctcccttctaggaagtatcacagtacaatagaatgaaatgactctcaccaatgcctgaatttttttttaagatgggagagtggttataagaatatagtcaccagtggtggtggtggtggtagtggctcacacctttaatagcagcgctcaggatgcagaagcaggcagatctttgagtttaaggccagcccttgtctacagatagagttctaggacagccaggactacacagagaaatcctgtctagggggttggggtggggcactgatctagagctaacccaagggaataaatgaatgaatccttttactgctcccagttgggaatccaatggcaattggggtgggttaatctccccgtgtttctttctccttacatgaggtttgtggttttcagtgagttatgtcacaacagtggccagctcgtgtgatccaggttattgttggttcacacagaatttcccgtctccccactgctgcctcagactctgtaaggtccccgagctcactcccttagtcacctgcattgcgttcaaacctcttgcagagatgcatctacgttaccatccacatggttttgtatctttctccccaaacctttaggtctcgtggaggtcgggcacccgttggagctacattcagggtgctcacggactggactgtgggctttaggatctctagggggcagcgctgggtcttcaggggtgaaaatctggccttgggtctctccgttgctgaggctctcccgttgctgtctcccacaggcacggacatggctgtcttctgtctgctgtgtgggaaacgctttcaggcacaaagcgcactccagcagcacatggaggtccacgcaggcgtgcgcagctatatttgcagtgagtgcaaccgcaccttccccagccacacggctctcaagcgccaccttcgctcacatacaggtaggctggtccaggggatgggtggggagcatctctggaccttatctctgggcttcacctccaaaaatatatggtgtgtatgagtgcaggggagggtgtttcaggttgcggcattctctgcttgaagttagacgcagaagggcttccatagaacatttaaaagctgacagttcttccaatccaccacccacccctccacctgtagacagtctgttcccaatctttccacacatggcacagaaaataattcattaaagaaaatcatactcttgaggtctatcctggctcagggtgagctctagatctcaacacaactaatgaatattcccaagggattctgacactggaggtgtggggattgcaaattgcattttgagaaaaactgggaaaatcccacttttaccccaatcgatcctaggacaacactgaggtcagtcagcacagggctccagagggtactttgaggaactcaccctaccttcataacagacatgggaggcctctactgtggccagaatgttgtctagggaagacagtgagagtatttgaacaagagccatgagatagccctgctcagccagttcacactatggagtgaaagacagggtatgtgtgagtcaagtaggcagggctagttgcccggtcctagcctagtcttgctaccaccctcttgatttaggggacaggatacccagttcagagggccttgaaggagctgtgggtcttttcctaactgaggagtagatgacttaactcctttctttgctctaaaacaaaatgagatcgtttcttactgtccatgagtggaagaatgccaatttctgaattatctgtctgtctgtctgtctgtctctccctccctctcccgtgtgtgtgtgtgtgtgtgtgtgtgtgtgtgtgtgagagagagagagagagagagagagagagagagagagctgggatcaagtctctctgtaaggatgtagtggagtttgcacacagcataaatgttctgcactcttcagggagggctgaaagaacttctcatcctcctagccttttcctagctgagggatggggtatgtatgtggctggcccttacatgggtgacgggctctgatgaataaagaaggagcttcactttcaggacctgagcagtacggtccagccagttgtcagcattctcaccaaggagcctgccttggctctgggttctggatgccaccctagtcagaggagcacaatgccatatcattatcaaaggtgaaaggctcaccagatgtttagaactacctagggctgctcggtagacaggagagggtcttagcaggtaaggtccagcaagggggaccaatgagagaggcgtatactcaacaactttctctacagcgtgcgcataaggacctcccagtaagacatcatcccatcagtgattccctcatagaccccctaagttcagtctcagggaagatgaccagcttccattagccacctccaggtatggcattggatcaagtcacttgatatcgcatggcatgagtgactcaagccctacgaagtccacccaggatgcagcttactttgcccatgcccctgtctcggagttcatttagccacgtgtcagtccaactctactcagggcaagccaagcttcagatctccagcaaggacagagtttgggtgacacccttgctcattctagaaacgcagacatgtgtgccccttgtgcacacacattcaagcactcattgattttcacaccagcccagcagaggctctgcccacccctgacacaatgccttattaatattccgttgctcttggcccatttgctgctggggcgggtgtttagcatcagcagctgtgtttggtgcgttagtccagccgtgctgttggcattgatggatccttgattcacatggctcatcatataataaactctcagctgcacggaagggaggggccgagaggacgggatctgaggagcccgggggccggggtggggaaggaggacggtggggtttaccggagcagaaggaagccacatggtaatgacaaaccgggggaaaaggagggtcacaggtgccctgggcaggccagaggggctctaattagtctcgtttgtcctgcacttaatgtcaagctcattaacgcgcctacagagttaatcaacataccacaaattggattttgacttttgtcgccagctttatgtacattgtggccagcctgacacgctcagctctcagggagagggttgtaggcctggtagccactgagctgtaaaacctgggtggggtgagagtaggtttgtgtcatggtgacttgtcatttttgctttttttttttttttttattctctgaatgcttttcactctttccctgggcagactccagggagttcctatttaaactcatttaacatgtgatccactttgtaattaaattcataaaaatctgatcaaacaaacccctcggttgtttgttaaactcttagggcccccctctggaagccgggagcacacacaggcagccagccctccctcactgccaccccctcttcccagaggggggctgggtgactgccgatgtacgttttaattaccggcttcagctgaagtctcacgtggcccttgctttatttatttatttatatcttaatgaggatactgaatctttgattaaagtcgtaatcgttgctgattcaggaaggagggggagctgggtgtcagaccagacggggccatgtgtgcagacagacagacagaggagggagggagggcaggtggccagacagcagacagacagacagacagacaagagacaaacaggcaggcaggaagggagagaggaaggaagagtggggagagagagcagcagacagacaggcaggcaagacagcagacaggcagacagacagtcagacagcagagaggcagagagacaggcagacagagggggagggagggtaggtgggcagacaacagagagatagacagagagacagagacaggcaggcaggcaggaagggagagagggaggaagggagggggagagaaagcgacaggcagacagacagacagacaggcaggcaggtagacagatggcagagagacaggcagacagacagacaggcaggcaggtagacagatggcagagagacaggcaggcagacagacagcagagaaaggcagagagacaggcaggcaagcatatggacagcagagaaacagagagacagagtctcatgcacaggctacccctcactatggtagtcctatagtcagtcagtacctgtatcagtgagggctaacctcgtgcctttgatggggataggaacagatccttggtatagctctagtagtgagagagacaagggttggtttggccaggcctgtgagctacaacagcacccgttagatggtgaagactggtgagggatgggacctctctctgtgcttatgtcatgaagtccccccccccctgcccatgtcccatgttctttctgtatatctttcaccccacgagagagagtgccagtgaacagatcccaacaaccactccccacagagcctcagagaaatgttctgagccatcagaggaggtgagaatttatgtgggtgctgggggggggctgcaattcaggaagagggacttttggttagtggcccacagaggggagatggcagagagagtaaaatatcattttaaagaggaagtgaaggcacagacatgcgagtctataaggagaaggacaatttatgcccaggcacgagcacagtttgacatggggataatgaaaaaacgtaggtcattgtggatgacttaagccttcagcagctgaagagaatgtatgaaatgcaggggacattacacggttggcagcctcgcacatctgcagagggacaagtgaaatacagtgggccattctttaccataaactgtggttgttggagatgcagcccagagaaattgtaattacagtgacagaggaatcagcgatatttaaatattcatgaacaaagtctggggtgatcaatctatctttattgtctgcgccttcgctcctgtaataaataagtagctccgcacctcacctttcattccccgagctcgacacctccgttacagaagtgcaaggtggataaccccactcctaccccttcggcccacgggaattgaaatgtggagtgtcccaagagaatggtcagctgatggacatgaggctagaccaaggaagggctgttcttcccagcccattacccagaattctccaggagttggttttgagcctttcgtgggcaagcactgggggcataagggtgggaaaggctccattcttaccctggaggtgtttcttgtggccctgtcagtcagtacaatgcagtgtggtgtcatttagccctgtggtaagtgcccagtgttcagatcctagaaccagaccatagcagaagtcccaacctagctacttctagctgggtgaccttgggacagtggttaagtccctctataaacaactcattttccccctcatttgtaagataagcatatcttccatcagatggtttccattgccatgtgacacggtctctgtgatgctctcagatagcggaaaaaatacagcacacgtggaccatataaatggcctatgttttggggggttggggttttttggtttgttttaagtcgtgtttctgtaaataaaagactaaaaatgttaggtattcttctcgttggggatagagaagaaaacacagctcggtctgcctggggagctagaaggggagcgtccacatcgaggaggggttgatggatgatcagggatccttagggtttgccagggaaaggagtagaagagaagcaggaaatacacttaactagtcaagtaggtgagagggtggtggataacactggggatcaaagagaagttctccaagctggagggattttttaaagggtaggaaagctaagctggagtggtccttggcccaagcaggctttcttttcctgggactgacccttacccagggatgactgcaggcccacagtaagtctagatgtatgaacacagggactggctattcacgttgtgggatcagtcaggtggcgaatataggcaaactcaggaccctgctgtcccctgaaacaggcaagaggaagcaaggatcttatatccagtctattgttctcacaggtgaccacccatatgagtgtgagttctgcggcagctgcttccgggatgagagcacactcaagagccacaagcgcatccacacaggggagaagccctatgagtgtaacggctgtggcaagaagttcagcctcaagcaccagttggagacgcactacagggttcacacaggtacttgagggccaggctggctctgggacctgtatggtgactgggaataggtagttatttggagaagcccaagcaaccatggttcaaggctcaaccagagagaaaggggtctattaagagatcatatggggactagagagatggcttgatgaaaagggtgcttcagtttggttcccagcacccacattggatgacccatgatcatctgtaactacagttccaggagatctgatgccctcttctggcctcagagggcaccacattcatgcacacacatacacaaataaaaataatttttattttttaatttatatttttttatttttcaaggcagggtctgtgtagcccttggctgtcctggaactcactctagagcaggctggcctcaaactcacagagatccacttgcctctgcctcctgcatgctaggattgaaggcatgcaccaccaccattcgactttaaaaaagtattttttctaaaaaaagagataatatgtggtctgagtaccatcctcctcctctgaaggccaaggcagacattactaatcaattgtgacagataatagtaatcaattgcagtagtgtgtcagtcagtccccctaggcaatcatactataaaccatccaggagtatcaggcaatatgatgcttcttataagtcgcaaattacagttaagttggtcagagtggggagaagtgaaatttgagtgatttttatgttgctccattcacagttggaggcataatcagagggcattaagttataataagggtcaggaagttgtgacattaattctggtgttctgaaatgaaaggagccagtgtatttaatggtagaatgttccaccatgacagagtgcttccacattcctttttacatagaaaaatcatgattctctgtcttttattgggggtctggggacagccagaggacaaggtttggagttggagagagtagagccctaggaccggcctctacttaattggaaagcctatttcttccccattttaagttcagttgcttaaaatgtgccccggtgggagtattgactggatagcattggagcatgtgtctttggagagctggttgttaaatacccaccccctgtagtctgccagctgcggggaaggtagcattttctgtgaggctaagggtgaagtagagcaaagaaagatggcctctctgatcagtggggacagcacccagtccagacaagggtatggtgacctcagctggcttaagaaagagaagagcccagggagaggcagacaaccggcaggtgtagtctgcggagctgttctcagagctctgtctcctggcctgagctctgtttttcttgcctctggcttaaagccacaggagaagacagggtgcttatggctgacacatgagtggcccaagggatatcccagagtcccagggttccctcagtcccttgttgtgggatgtgacctagtgggcagatcattaaatgcatcggtggtgactattgtaaatagctggtcgatagttagatcactttggctgttcattacttcattatttgctggggcctcagcacggaggagtattgatagcgagatggctgaccagttaattactgtattgaaacaaggttctcttacatctctgctcagctccaggggactctagtggaagggagagctggatagccggctagggtgacactgttgtacactcctaggctctctgtactgcccctccgcactgtcctagactgggaggcaaagtccaggagaggtccttggagcattagtgggtagacagccctagatagagtatatttgaagaactggtttcttggatttcccctacctctcctccttactgactgtagctctaacaagactgtatccattctcctgttccctacgggtgagcttgttatgctgaagcacccagaagggcttcagggacttgctatccctttccacagcatacacatttccttaattagaagggaagcaccctgccttaagatagtaagaccagagcccagaacttcatggacagtcctctcgttaccagccactagcctatttacagtagtcacaaaataaagtaggagtgaagtgccacaatgaccagaccactaggcctgtgtggctaacggctgccttgttcgatggtccagcccacggtcttgggaagttctgttgacgactgcagggctacaaggatggacattctccaacaagcccaaggatggctcaaggccctttgggtcttcacattcccctgtcctgtcttgtcttttccacaggtgagaagccctttgagtgcaaactctgccaccagcgctcccgagactactcggccatgatcaagcacctgagaacacacaacggtgcctcgccataccagtgtaccatctgcacggaatactgccccagcctctcctccatgcagaaacacatgaagggccacaagccggaggagatcccacctgactggaggatagagaagacgtacctctacctgtgttatgtgtgaaggggggggggcatccccccaacacatggtagagcagtggcaggagccagcaaaggcgagctagaaccagacaaagtggaaagactacggagaaaagaataacagaaaagaaaagggggaaatagaaaaaagagagaaggagaaggaagcctgatagttacttggccttggattatttcctggggctccaggtgatctggctatcaaaccactgccccctccctggggtctctgccctccttggttctcttgggtgggtggggtgggtttgcttcattcacacaggggcatatttttctcctctccacaacctataacttccttttgtgtctagaaatggaaaccaggaagcagaggtgagggtctctctggtcagagccatgacctcttagacctcctttcccctcctctgaagaggatgggaggggagcaaagagggagaggcagagatggggggggggtccccggctgatgctcagagtggcagctctggtgtcatggcgggagaggctttctgctctgcccagctacagctggtgcccctcaccgtctctgagggtccagtggctctcctcacccttcagctttttgcacctgcttttgatggctgttctctggtcacaaggggcttacaccgtctgtggatctgaactgtatcttccctgggttcctcctagggaaagctgtgtcagattccaaaactccttccttccttccttccttccttccttccttccttccttccttccttccttccttcccttcccttagctttcagagaacacagaacaaaataaagcaggcattgtaccccacccaaactccctcatgagcaagagtcctgctgagctgcactctgcttgcaaatggaaacaaagatcaaacaaaaaccaactaaatatattctatcccaccctccaaacaagtacacatccctgcaaccgcagctcagcccctaggggaaggaatctcatcatcctattgaaaggcccctttgccccagatggggagtgaatgccccctctcaggtgagctttacttggtggaggtgggagtggatgccctgcctgatcagagtgggaggactggccactggagaacgttactgtcactgaggatcctctaagcacagggagaaccctagatctggagattagcaccgacttcctggctgggagtggaggtggtggggctgcccccagggagcagaggggaggagctgatggcgcttctggcctcttgtcatgtttgcttttagcacattgtacttgaattacctcagtttctttctttttttctttctttttttttgtgacctcatgagcttttgaatcccctatctccttccccacccttttggttgtgagagatattagaggaactgggagggtgtcattttctgttctagtggaagttaatagttggctttgaacttgacctggtagaggccctccccttctctggctggaagctgtaggaaaaagtggaccattcaggatctgagtggaggccaggagggctgagaaggtggtgggagtggagggaaggacgactgggttgtcactatgtctccccatagtatcactagtcactgttggcaccacccagggctcagaccatcagtgcccagctttagttcagccggaaacactctggagaaaggtcgcagtggtcttagaattatctgggctgtttaggttctagagggcctgttattaagatctatacagccacgtggtctcctgccgttaacactgccagagttggtatattttcatggctgctgtctgtgtacatgaggggcagatgagccaggttttgttgtgctgggtggggtattgtttttctaaaagctacctcttctgtttgtccagtctttggttccttctgcagctctgcctcctccaacctccctgccctgaattttgggaagcacatttgtaataatctcctttgctttgggacggacccacacccacttcatttcgtgctttatgtatgtgtaagagacctgttgtcttttcctctcctcctcctctttctctgagagagagtcatggctgtgttttaatctcagattttaaaaagtggtttaggaaaaaaccgttgacaggggtaaagggccatgaaaaggaacagaaagtccgaggggtggccgctgctgtagctacgccccctattcaccggccacgccccccatcccgcccatttttttccccctacaatttcatccatcttatctgaaggccttaagaaaaaacatgtgttgagaggatatgggttggggtcgcttgactctcagtgtgaggtagggatggtaaagtgcagaggggactatttggaactgtagggatgacttagtgcattgggaaggaaaaaaaaaacctttaagcttgaaatacgtggccagaacagctgtcgtgcttataatgtgaaaagaggatcttctagaaaagagtggtctttaaaagtcattatgtactatggcttattcccctgaccagggggatgaagtgtgaactgctcaccttcagggatctgtaactcccagaaaacagcatttttaacaggaagatgtcgttcaagatcggtgacaaaggggaaacctttcgactcctccatagaactggctggtcccttacctcccaacccttcccactcagcctgccccacacagacccccgcccaaccataaaagctggagagggctgagctgatcttttcaaactgtaatatttttgtagtatttgttatttcttccgttctacaggaccttgctcttttccttttgtaatgtgaacaggggtgggggtgaaaaagtaaaaaaaaaaaaaagttcatggccatcaacagcaaaatctgtacgtgtgtgtgtgtgtgtgtgtgtgtgtggaggtgaagtcacgaggtattgtctgtgctgctgtctcagtgttggttggtacttgctcagcctgccctgtctgtcactgagggctctgggatcctagtggagacagggaccgcttagaagggacttcttccttctgtttctcttggagccaagacacctgcccctatgttccaccaggccttccccccagtttcccactcagaaagaggaaatggtttggaagttgccagggccttctctgctgggcttgatggccagtggacagggaggagctgtctgaagcctctggagcacggagctgaggaggctggaagggtggaggccctttctttcccagggtaaactgtgtttccactcgttgagacgtctggatagtcacgcctctgcctttggccatgttgttaacagaaccctggaacccccgacttgctgctgccttatccagctcggtgaccttctccccacctagcaaatccaagctgctcactggtccctccccctgcccagtttctacgaatgactcccttcatgcctctgaccacactgaccccccccatcagtgcttctcccctgcttactcctttgctcatttaaagcattaaaatcctatatgtatataggatagacaaatatatatattatatatatagaaagatatagcaagagagatataagatagagaaatgtcattgctgcttggttgctttacatgaagaagaggaaggcaggtctggggtacaaggggtgggttagaaggctgggtgagcccagtgattcagtacaatccagggatgccacacgggcttgtgtaaatcttcgtgcctgaacagtttttccatgttgagaaaaaaaaaaaaaaagaaaactgctgcagatttttaggggtgtatggtattgctgccaggtaccatgggggcagccgggatgggaggaccagtgtcccttagaggagacaggaagcacttttggtcttggggcatggtgggggaagtggagcgggtagtagactttttggccaatcccctagccagccagactagggtggacactgaggaacccgacgacgtgagacagatacacaaagagctggggggctgtggttctgttgatttatctcccccgccccccacttgctatcttctccccccttctatccagccttgccctctcctgaatcttctgacccggctatggtggccgcacttacctggaggttcctggaggaggacaaacagcagaactaacaacgggtggaggaggataaaaaagagatgcccaagagaagggttggggacaaacagaatagatggagtcaggggaaagagtgaggagaagggagagaaagccccagcaagcctgcccaccagcagctctgagtcctcggctcctgggtggcccactttgcagacagggtccctcctccccgagtgtatcatagtacttgttcacatagtgttattgcatgaatcctcgtaaggtgaagaaccgtcatgatgcaccatgccatcgccctatatataaagataaatatatatatatgtatgtatgtatgtaagttatagcactgagggccctctggccctgctggaccaagcaaaactaagccttttggtttgggtgtcatgtttccttgtttttgttttgttttttgttttcttgttttttttttttctttttttgcttgtctgatgtgagagcacaggtgccagtctagttgcttcgttatcacagaatagtgtttttaattcatcaatgttctagttaatgtctacctcagcacctcctcttagcctaattctaggaggttgcccaattttgtttcttcaattttattggttcttttggttgttgtacaaatcactctccccacccttggcccctccccctttctcctctcctgtctctccccccacccaccctctcctcccctcaggtccgactccctccctccagttagccccatcccaccactccccttgccttcacttgcctccagtccagactgctttctgtccacttggaagtgcgctccccgttgcagccgcttacctacccacacctgccttccttctgtgtagattgatgcgtttcttgttaacttcagtgtttctgacaagactttaaaaaaaaaaaaaggaaaaaaaaaagaatttactgctgcaggtttttttnnnnnnnnnnnnnnnnnnnnnnnnnnnnnnnnnnnnnnnnnnnnnnnnnnnnnnnnnnnnnnnnnnnnnnnnnnnnnnnnnnnnnnnnnnnnnnnnnnnnnnnnnnnnnnnnnnnnnnnnnnnnnnnnnnnnnnnnnnnnnnnnnnnnnnnnnnnnnnnnnnnnnnnnnnnnnnnnnnnnnnnnnnnnnnnnnnnnnnnnnnnnnnnnnnnnnnnnnnnnnnnnnnnnnnnnnnnnnnnnnnnnnnnnnnnnnnnnnnnnnnnnnnnnnnnnnnnnnnnnnnnnnnnnnnnnnnnnnnnnnnnnnnnnnnnnnnnnnnnnnnnnnnnnnnnnnnnnnnnnnnnnnnnnnnnnnnnnnnnnnnnnnnnnnnnnnnnnnnnnnnnnnnnnnnntatagaggttagaagactaaaaggttgaggaggagttctgtgtatgaatggttttcctgcacatatgtatgtgcaccctatgtgttcctgctgcctgccctctgaggtgagaagaagttttcagatgctctggaaccaaggtcagaaatggttgtgagccatcaggctgggaatcaagcctgggacctcagcaagagcaagaagtactctgagccatctctccatcccagaatacaaagggagtccattctctctgtttacctttgagtcctgagaacccaagtctggctgtcaggcttggcagcaggtaccatttctcactgagccatctcatcaacccaacacccttgctttggggtgtggggggtgtgggttgagaagcagtgttaaatgtatgaatgtcgtttgaccttggaacaatgcactaagtgacagtttcattcagaaaaactcttggcttgagtgatagtttctgcactgggaattcaggaagcagcactcccgaagctgccacgtgtttttcaaagtgtgtggtgaccactcagtctcatgcagtcagtatgcgggggtctaaccctgaccagatcagatgccaaaggatgcctgcttttcccaggcttgaggtacgatagccctctgtcttcttcacggggaagcaagcttcggagttgtctcaacacagagctttcaccagaaggttctgtggcagtcatgacctgttgcatagctagaggttttcactcagtggtatagcacctgcctgaccttacgcctgaggctctatctggtccccggctgcaggggagagcaccacctggctcatcttcagctctaactgcagctctgctcaggccctggatgcacagcctgataacatctctgcctttcttctccagcgtcatgtcttcccactagacccaagtcacggcctccatagtgggtcactaacagcgctaaaacagtgtagcctgagttcctgcacttccactgacacacgtgtgtgtgcatgcgtgtgtgtgtgtgtgtgtgtgtgtgtgtgtgtgtgtgtgtgtgtttccagtttttattctccaggtcctgggtctgttggccttcgggttgttgagctgagagactctgaagtcacactaaccctaacaaccctcccaggaagaggcccagcccatggcaggaagccttccattcttccgagccctaggtcctctgttggtcctcctttcccttctctttctcctcatcttgcacccaggtttgcatctctctttgtcactcctccgttttctcccccattactcactctcatttctgggatatttcttttgccctgtacctcactaccacgtcacgtgtccctgcttcttaaaaacaaaaacaaaaacaaaaacagtccttggccaaagatgtatacgttttgattgggatctgctcccctcaagccttgcccctcaagccagcccccgccccgccctctctgcactccgtccctccccctctgcaccccaccccttcctcaggcctcagctttctcttgacagatgggagggcagtgggcactccctctttaaaacaacatttaatcgccgttttctgttcttggacatcaaagctggggcttaggcactgcactggggtcccggcggcgcgggctcttggggagaggaggtgagtgaataggagctggctgaatgggctttgtgtgaccgccggggtctgcctgctttacatgctctttgacccagatatgatctcatggagagaaaggggcccggccaggccagcctgagaacgctcctccgaggcctgctgcagcccctcctccctccctgggcagcgggccgcagctgccctctgccccagcccgcagcatggggaactgcctctagggcaggccccgccaggggtgggggtggggcggggcacgaggctgaggtcagaagaggggacaggcagctggactggaaagatagagtcccaggttgggtggatgaggatcatcccacttgtgctcttggcttggttggctgggagcctcctctactcactacttccctgcggtcccttcctgtccagtgctctctgtcactactgccgaggttctggtacacccttgattggctctctttttagtggctctggatgtcactcagggagcagagttgaagcccagaattaacagaagtctgcacaagacccacaagagtgtagctgatcaaacaaagaagagtgaatctaaggactgctccatcctgccagcacctcctctccctccacccacagccacagtgccttccgcctagctgccagcagagtccctctcgccccagcatccatccatcctttactcttccatcctgcagagaatatatccccccaccgctccccctctacagacaacttatcacgtttttgaaaactccttaatcactcctaggataggtccaaactccccatgggacctcaatggtagtccctgcttgacaccccaatctgttctttagatccacccctaccttgctagagtcaatttgatcaccaggatggttttagagacttagggtcctgtgctctgcggcctgtgtcaccctgtttcaccagctgaacagagcacaacgcaagcttcctggtcctctcagctttccccggggtcttgcttcatctcaaatgctacctttctcaggagaccttccctagatgcctgagactgtatcgggtgccctgctatgcagaccctgcaacccgccatttgtcacagtgcattactgtcatctaagctctccggtgttcccttcaccagacatcgagttccttgaggttaggaaccgtgtgttctatatcttggtgttcctagagcctaacattgcacttggcaggtgcccaataaatctttgctgaatacatggaaggaaaatagagggaagaagagaggcaattcgctcactgaaactgaggatgcagtcgccaagggtgaggaaatggagctaaataggaagacgcccctcacatgcccacctaggcatctccccatgacatcaagaactggtatccatgctgcaggtagagtagctcagtgtgggctcttgcgcctgtatttgttcctaaggtcaccttaaaggaagaaggcgtgacaggctcaggacagtggcattttatagctggggactacctggcttggtccagtctagggtgagctgtttccacacagaccggaaggctttgccccaccgggaggccctagctctctctgtgctcccagacccagagctacagctctttggccactccttacccggagtgctggcggactgactcccctaggctgctttctttgcaccccaggggtgcctcagtgaaagtgaactctctcatttaaacctgactctgcagccctgcggccccctgcagagctaattaccctgtagttccaaactgattgctgtacactcagcttaagccctcctttatttatttactgactacattaatagcaaagcccagtggctttcagctgctcctcgctgcacacctctggctgttctctgttgcccagcttctctcagcctgacatagagcccccggaacttaccaccctaactgaattccctggacaagataatagcgagagaacacggttttgtccacactgtagtcctgccacgctgggctccttctgtctgactcttgggcagtgggagagacaacagccagagctcaccagctggaggggtgaatggagggaaggtaggacgcctttcatctacaggacatgaaatgaatctgcttctgttcagcaccacagctcttgtagagaagtactggctattggctcctctttacaggggagtaaacagaggctgtgacacacacacacacacacacacacacacacacacacacacacacggtcctgttaagggaagagcctcctctccatcctgtcatccagggttgactctttttgttctgtcgcctgttctcacagcacccgccccttgtcaccaggaaggaatccctccatgtactgagtcaaatcccacaattcctcagggttgtctgtcctactcatgtacttggccagaatttgctggaaaccaaggaacattccaggggtgcattccagggtgggcctgggtcaggtctcattaccctggtgaggaagccctgcaaggacactcagctacctatgacaaggtacctcgcctccttcccattctgtggtccaggaggttcacggctgccacagccaccgacagtttctctggtgccctcgagtccttgagtttacactgggttctagccatgagattcggcagcattctgaagaccggaagggcctcaaaaggacctctggagtcaagcattcagcctccactttgattcagattcagctcagtggctgtcccattgccacacctctgaagagaagggacagttggaatttagcaagaagaacctcaattcatagtcaaaaggacgctgtgttttgggccagctctgccatactctgtttggctttgattttgtattaaggttctccaaggtcttctcttctcaactgtgagacggaacagcaatttttagcccatctaccctcaggcacttatgtcagctgggtaagacccttagaaatcaactttgtaaagacacctatgacaatgtaagctataaggggatgtggcaggcacaggatggcctggaaggggaggtagaggcctaggtgtctgtctcttcctagtccagaagcccctttgcgtggcctgaaatgagcagaatgc

SEQ ID NO: 2235 - DNA, 2516 bp, Mus musculus
tgcggcagagaggagttaagggtgacgagagcgggtactgcgaactgccgggcgatgccgccgctgccgccgtgagatccggagcaacagttccccagcaacaccccttccccgatccaggcacacccctaaccccccaggcacgcacacccaccccaagctccaggctccgtaagcgtcccctctgctggccccgacgtctaccctgccccaccttgcagagcagagaaggaaagagagccccatgcctgagcccaggggagcatcatggatctgacaaagatggggatgatccagctgcagaaccctagccaccccacggggctgctgtgcaaggccaatcagatgcgactggctgggactttgtgcgatgtggtcatcatggtggacagccaggagttccatgcccaccggacggtgctagcctgcaccagcaagatgtttgagatcctcttccaccgaaacagccagcactatactctggacttcctctcgccaaaaaccttccagcagatcctggagtacgcctacacggccacactgcaagccaaggcggaggacctggatgacctgctgtatgcagctgagattttagagatcgaatacctggaggagcagtgcctgaagatcctggagaccatccaggcatctgatgacaatgacacagaggccaccatggctgacggtgggggcgaagaagaagaggaccgtaaggctcgatacctcaagaacatctttatctcgaagcattccagcgaggagagtggctacgccagtgtggctggacagagcctccctgggcccatggtggaccagagcccctcagtctccacctctttcggtctctcagccatgagtcctaccaaggcagctgtggacagcttgatgagtataggacagtcactcctgcaaggaactcttcagccacctgcagggcctgaggagcccacactggcagggggtgggcgacaccctggggtggctgaggtgaagatggaaatgatgcaggtagatgaagcccctggccaggacagccctggggcagctgagtctagcatctcaggagggatgggggacaagcttgaagagaggagcaaagaggggcctgggaccccgactcgaggcagcgtcatcactagtgccagagagctgcattatgggagagaggagagtggtgagcagctctcgcctcctgttgaagctggccagggaccccctgggcggcaggagcccctggcacccccagtggagaagcatttgggtatctactcggtgctgcccaaccacaaggccgatgctgtgttgagcatgccgtcttcagtgacgtctggtctccatgtgcaacctgccctggcagtctccatggacttcagcacctacgggggtctgctgcctcagggcttcatccagagggagctgttcagcaagctgggggagctggctgtgggcatgaaggctgagagccgccctctgggggagcagtgcagtgtgtgtggggtcgagcttccggacaacgaggcagtggagcagcacaggaaactgcacagtgggatgaaaacatacgggtgtgaactctgcggaaaacggttcctggacagtttgcgactgagaatgcatttactggctcattcagcgggtgccaaagcctttgtgtgtgatcaatgcggtgcccagttctcaaaggaggatgccctggagacacacagacagacccatactggcacggacatggctgtcttctgtctgctgtgtgggaaacgctttcaggcacaaagcgcactccagcagcacatggaggtccacgcaggcgtgcgcagctatatttgcagtgagtgcaaccgcaccttccccagccacacggctctcaagcgccaccttcgctcacatacaggtgaccacccatatgagtgtgagttctgcggcagctgcttccgggatgagagcacactcaagagccacaagcgcatccacacaggggagaagccctatgagtgtaacggctgtggcaagaagttcagcctcaagcaccagttggagacgcactacagggttcacacaggtgagaagccctttgagtgcaaactctgccaccagcgctcccgagactactcggccatgatcaagcacctgagaacacacaacggtgcctcgccataccagtgtaccatctgcacggaatactgccccagcctctcctccatgcagaaacacatgaagggccacaagccggaggagatcccacctgactggaggatagagaagacgtacctctacctgtgttatgtgtgaaggggggggggcatccccccaacacatggtagagcagtggcaggagccagcaaaggcgagctagaaccagacaaagtggaaagactacggagaaaagaataacagaaaagaaaagggggaaatagaaaaaagagagaaggagaaggaagcctgatagttacttggccttggattatttcctggggctccaggtgatctggctatcaaaccactgccccctccctggg

SEQ ID NO: 2236 - protein, 666 aa, Mus musculus
AQGSIMDLTKMGMIQLQNPSHPTGLLCKANQMRLAGTLCDVVIMVDSQEFHAHRTVLACTSKMFEILFHRNSQHYTLDFLSPKTFQQIYAYTATLQAKAEDLDDLLYAAEIIEYLEEQCLKITIQASDDNDTEATMADGGGEEEEDRKARYLKNIFISKHSSEESGYASVAGQSLPGPMVDQSPSVSTSFGLSAMSPTKAAVDSLMSIGQSLLQGTLQPPAGPEEPTLAGGGRHPGVAEVKMEMMQVDEAPGQDSPGAAESSISGGMGDKLEERSKEGPGTPTRGSVITSARELHYGREESGEQLSPPVEAGQGPPGRQEPLAPPVEKHLGIYSVLPNHKADAVLSMPSSVTSGLHVQPAVSMDFSTYGGLLPQGFIQRELFSKLGELAVGMKAESRPLGEQCSVCGVELPDNEAVEQHRKLHSGMKTYGCELCGKRFLDSLRLRMHLLAHSAGAKAFVCDQCGAQFSKEDALETQTHTGTDMAVFCLLCGKRFQAQSALQQHMEVHAGVRSYICSECNRTFPSHTALKRHLRSHTGDHPYECEFCGSCFRDESTLKSHKRIHTGEKPYECNGCGKKFSLKHQLETHYRVHTGEKPFECKLCHQRSRDYSAMIKHLRTHNGDYQCTICTEYCPSLSSMQKHMKGHKPEEIPPDWRIEKTYLYLCYV
